United States Patent Application Publication US 2022/0167576 A1 - sequence listing, part 14

SEQ ID NO: 30 - DNA, 35937250 bp, Oryza sativa (residues 27,481,429-29,595,384 of 35,937,250)
  misc_feature (5969519)..(5970518): n is a, c, g, or t
  misc_feature (13681864)..(13682863): n is a, c, g, or t
  misc_feature (13684155)..(13684254): n is a, c, g, or t
  misc_feature (18795366)..(18796365): n is a, c, g, or t
  misc_feature (24815509)..(24816508): n is a, c, g, or t
  misc_feature (35936251)..(35937250): n is a, c, g, or t
aaaagaaaagtgaacaacttaccgcatcttcagctgcaagtactttttcaataggttggttggtgccacattctatcattattccaccggaagatccagtcatgttgacagattgcttttcaggctcatccatcctccgaaatttgtatcttggaatttggcgaatatcatcttccgatgctccctcctggtatcaaccagatggtaaaaacattatcatgtgtatactcatctccaaagcgatgtaatccatgagatatgcgatgttcaagcagattattcatatatactgcacacataaattattctaaggaaaggaagctgggaagtcttactaccagcatacaattaaacaatattaatataaacccagaatgatgagtatcgggatgtgtccataagtccaactagggtcagctgggacagtttgaagtttgaacagcaaaagaaattgatgaatttaaatttaaaattttgcaaaatgattagagaacacaagagaaatattccaatactgaactttctcagtttcctagcgatatccgacttttaacagcttaacgtcaactgaaacagttttaacagtagctagccaatatcaccccatttatttagaaaaaccgtgtggtctttcaatttcatcaggggatggacctggatcggggtcctcttgaacgaggccataaaaataattgcattccatggacatatgttcctactaatatggccaaggcctaaccagttgattttgagaatagttacagccctatacggtgaccaatttgaagcaagaagagaatcaacggcacaagaagggtagacttagcataattacgaaaataagttactagctgtaacattaatgacattctctactgtaggcataaggcattcaataaaccatacctgatcagacacagcatataaaattgctatgatacatgggaggcagcaacaaacagcaattccaatgatgcaagccaaagcaacacaaaagacgacaaagaaaacatcaaatgccagaaagacgatgcaaagcctgcagatgaagtgtaaacagatataatgaaaaacaaataaaatgatgagacatgtcaaaaacttcaggcatatcttagaaattatattaccagtaaagttgaggtgcatcatgagtaagaacttgcccaccagcagatacccagtaaaatccgattatccaccatataaaggagaacattgtattagcagactccagatgttttgcaatactgcaagcagatttatgaacagaaaaattatcaggatagaagatatggtggccaactgaactaaaagcaaaccatgaaaaataaattaaatggaaactatttccattaaatacactaaactaattataatagctctgatttcccatagaaataaaaatttctaaaataaaactaggaaggtgtggtaaataaaaatgagataaaggcttatagaaggtagaaaagcacagtcgcatttcagcatagaaatatgagaaagttatgctatattcagagatacacagcagagtgaccacattagtgtgcctctcctctctaactgacaatcaaaacctccagcatccagcatagcatagatgcatgctatattatgtctgttaaagccacaacatgcttgaagtccatcttaagaattgacattctgcagacaactcatattggcactaacatagaaaaaccagtatgattcatgtaacttgcattactagaagcaactaggtggatgacgaactaagataaagtggacaacaataacttctggcaaaataggaacaaatgcaacaaaatatatcttagtggattcacagacaaaggtacttgttcaagatcaccaagacttaactgaaaacccaaggaacaaacaaagttagttttaaatattcatataattaaaatcaaatttggtagtcattcttgtttattctataggactaaagctactgagagctttaaaaagtaagcgatcatgcagaaataataaggttgtcacgatatagcaacataagaaacacaggtgagaaaattatgcatgtccagtaaatatatgagcagatattttgttacaggctttcaggttatggaaatcaagctaaaaacatccacttagaacttcaactataggtccatttcatgtattcaactatctttgttcacatatcaagccaagagttaattcaaccttggttgggaactctcatatggttctccttgttccaattaggcaaaaattaagacccacaaggacacgaccaacatttctagcatacattatgaacatagttaaaggattagtcttgaaatttggtacaaaattactaggatacctgtagtgtgaccacaatttctagtttaccatgaaaggaacgatagccttgaacttaacagtgaaagactgaaagttacttcaactagaacaaagctaaagtttagaacaattaaaggatcggtaatagcaacaatccctctaatcagtcctttacattaccgaacataatcgccattgcggccacggggagcacgctcgccggcgtcctcgtcacttgacgacgacgatccatcggttcctgtctcctcgtcggcggccatgggggattcaccgctctggccgcggcgcatacggtactcgatggcgacgcaggccatgtggaggacgcactgaacggcgtacccaacgatccagaggcggagcggcatggacgggctctcttcgcggctcagcgcgagcacggcggcggcaacgaggatgaaggcgaggttccacaggaggtcgagcgccaccacggggcgggagtaggcccagtcggcctgccgctcctccagctgatccgccgccgcttcccgcaccagcagggacggctcgcgcatcgcccggcgaccgctccggcgcaggaaccgagccgctccccggagcgacggccgccgcagcgcgccaccgtggcgacggccgccaccgccgccgccgccaccgaggagcggtgccgagtccaggcgcgcgtcgccacgggggcttggggatcgtggcgtcgccatcgccggaaccctagccgcggaatggggaggaacgtgtgggctggggctctggtactacctttcctcctcctctagaaatgagagaggaaattttctttcccggaaggactgttctttacttgattgtcatctcgcggagaattacaattttgattctgatgaatgaacggtgatttttttgggtgaaaattgcacggtgacgtattggttgaaaatgttgtaatgggagattgaagtttgattggtttaacctactttttagcatatagaatacgagcaatttttttccttaccaacaggaaaaacaagcacaagctgtagctcgatggaaatggttggagattcacttcccaggctgctacagttattcgattttttttgggttgccttttgtggtgttgctataagtgttaagtttttttttcgcctgaactagtgggtagagataatatgtcatgtgcacctgtaattttagctttgtgtatcagctcgaaaggtaagagaagacagtgaaggcttatcggtggaagcaaagaggtttggagttgacagagggggatggctgcctcaggtatgggaggaggacattgagcacatgggcggcgatgaatccaatagcacaagctatagagataagaagcggaagaacatcaaagatgttacgggatataatagataaggtgtattatgacggtattattataaaaggaaacacatggtgggtgagagcgggtaagtggatcttgctagtgttaataaagcatatggacgagatggttgaatatagaatgagacgctagagagtgatggtaagtggtagggttaaatttcgaataaacattgtattagaatatgacatcatggttgtattattcggtgctcactttataacatataaacacaaggatcttttgttacacttttgtgcgtacatgtggtggcatgtgcacttccgaaatactgcatacgtaaattagggataaatttcgtagacttactacataccaatatattttgaaaatctaaggttccttgttgccacaagttgttggtgtttctggccttataaggaaattgcttgacaacaaacattagagcaaaaggattcggtcgctatatccgctctattttgtaagcctggaacattagagcaaaaggactcggtgcaagagaacctttagatttccctttgccctaacttgttaattagaggatatatcattctagtgttttcaatacacaaaggtctggaaaaaaaaaggctaagttgtaaggtatttgacgcaacggtaatactaaccccttcagtgatctagaaataatgaacaatacccaaatatttgatagagtgtatttccctccatgagcagtagctagctaagtgtaagctagcctaaaattcacgggctatactgtattgttctggccactctctccaagtttattttttctatttgctttgttctaaatgtttgcggagagttggacttggttcgtggtagcacaacaactctattaattgttttggtcatatctatcacacttttttttatgaacttaggctgtcttggcaaaaacaatcatagagttaagtgtagtttagaccattattatttcaatcatcatgtatagttgggccaattatgagtttgaggcccatttatagtatagttgttacatctagatgtgtgaatgtgcttttacgctttttaccagttgatatttgtatctttctcttgcacatggaaatatctatatgggtatatttctcaatttatgtcttctataggcaatttattcttagccattggattaagatctgacgagtggtatgtcacagacacacacacactcaaatatatatatatatatatatatatatatatatatatatttgagcctgatctgaaccctagcttgagtcctcctacccttgccgccgccgtcgccaccaccgtccatctcccttcacttagcatcctctccaccacaacgattatctccggtgcccttcaccgtcttcttcgcaatcttgatgggtcatcacctccggatccacatttgttgtcatcgtcatgatcgagcattgttcagaaattagtcaccatcgattgccacacctccacaaatacgtctccatacctttcaaaagagcaccaagcgatgtgagaaaaggattggttgaaagaaactaaccatatgtgttacaacccgtaactaaaatgtttatttgtgattttgttaaatatttggttatttttttgaactgaagatatccttttgtggctcctaatacaattggttgtttccttattcacgtaagcaggatctgttcatgtgagcatgtgacattgtgggagtggggccatctcttctgcctcgccaacatctgagagcttgacatttgttaacggaaaaggcaaatggtaagcaatattttttccaacttctactgcatatatgcaatgcctctctccatggaatttatgggccttttaaaccgaggaatttccttacaattgaactaaccatatctcgtagtagaagaggaatttcatccaacaagtatacattttgacctatgtttgatgaaattattgagtggaacgaattcagtgatctagagagtactgtaaacactggctacagtatcctcacgacatcattggccctgtttggggagcttgtcccagctgcagtttttctcaaaagctgcttctgctaaaagctgccccaaacagtccacagtttctgagaatctgtagctacagagctgaagaagccagaagctgggtttcaaagctttttcagattctcataaactggctatcaaacagctgcttctcaaaatcaaaaacttcttcaaacaggcctattttcacggctcacgacctaacaagccgacgccacggacgcggtcgttgacaagaggcttccagtgggcgcagcgcgcaccagccaccaccactccaccagggccaatctatgccgcctgcaggggggcgtgataacccaatcgttttgtcatctatagatgcggcgtgaaaagggtaaaaacagcgtgttttctttggggtagatcgatgaggtgacgagcgtaggcctttcaacttttcgactgtactccgtacagaactgggtagactcccatgacccatcgccatcgcagtcctgcaggcacgtacacacagctgcgctggtgaacatgaaatgctcagtactcactgttccggggtagacaggatcttatgtggtcgtagcactgtagagtactagtactggtactagtatttccttgcaccaggcgtcatgctgctcgagtatttgcaggccagcacgtacaactaactgtagtagtacatgcaaacaccaatccatagctttgatcccatgtgtattgcaaaaaacaattttcagctgatccatagcaatgccactgtcaaacagacattattggctgatacactttctgaaaccttcaatttgatcctacacttgtaccataacctatatgaagtatggacgacactagtacagtatgaacccagcatttccgagaaactactagtacaggctacctcatacagccatagcacaacaaaaaacaaacaacactagagcaacgatgagccaactgccaaaagtatacaggtttgactccctaagacgacgaaactaaagcataagtttaacccctcgaagaaatgtccaaaatgcatggtactgtatcatccaatgatcaccggctgccggggagagatcggcgtacggtagaggccagagtcaatacccgaaccaccaccattgctctgtgctaaggaccggccaagcaagatccttatcacctagcaaaggttattttcttttttcaacgcgcggttcgttcttgactcaggctcgtcgccgccggcgtatccccgcggacataaatccactgtaaacactcaggcgtcgcactgcagcgccgtcttgatcttcttgatggtgcaggagatgagattgttcacggtctcgaccgattccacggtgagcttggcggtgggctggttgttgacaagaatctggaacgccacggtgagcagagagccgcccgtctcgtacccggtggcgccgatgcgaggcccatcgggcaggatggcgaatccggatggaagcagagcaacataggtggagtcgccaccattcatgacaagctgcattgccgggatgtctaccggagcgtacacaacaatggagccagaagcgtcggtgcacgtctcctgaagtatcagcatgctgctctggttggcactcacagcctgcatcagaaaaggtaaaaaagaaaatatcttgttttattttctgcaaaatattatgaactacagaagcaacataattagagaaaaggattcatgggggtaaagaacgaaatttaatagtgacattgtacccgcgagactagttaacatctgaccagtcataaacagttcagacattagcctcattatccggagatgctagtgtttggaggatttgtttttcctatgtttttcttgtcaagcagtccctggaatcatgatctgcatacaggatccggatgcatgctaacgcatggtacacacacaacacagtagtgcaagttgtcaacctgacacctttttcaagcagatctgcgtttcctaccctgttctgtcctagtttgtcctcttctgcagacctcgtgtaaagttcggtgctagtcgttctagtcgggccttgattacgacccttttttctctaaccgaacaatatctgatggaaagttgccagactttttgtttgtgatcttctccatgtcatcgtcagtttacaatattggttatcgggtacggtgttcatagtttagacaggagtagcctttttttctggaaaggaaagacattagtagaggtctcacaaaacttgctaacctctcatttaggctacgggaacttataaacttttctttgttaggcacaatgtctctacctagctttcagcaatcttcttgtcaatgcactgatcagtatataagtgattaagtgcagtgctaagtagagtttgggttgaagataagaaaagggctactaataaatactacagaccaagaactttaaatcgtctactataggcctatagcaagttaacaaacgaataaggtggaataactttagaattaatagcccacccatcacctagaaatggaacgcacacctacattacattggcccatacttgtgattaatgcaatacatacagcataccagcttgtgtgcaggcttgtgtcggaagagaccaccgaaaatggttagccttatctactgtgctgttttgttcgaaattgatggcacgtactgctaaaaaattactctacgttttactatatacagtagtactatccagttaggcaccgcacaaaagaagaaatgtttagagcagatttggggtagcaaatactcacactggccctgaggagtgaaaccgagttcccatcccgctgccccttggcgatctgggtcatctcctgcatggggcctccattgctgaggatgtcccactccgcacgcagctgctcatcgcgcaggaagttgaagagcttctccggagccacgggcacccacaccgaggtggccgcgctcagcaccacgcccggtggctctccaggctcgctcacgctcttccgtgccatcacgcgcacgtcctccccgatgctaccggtcgcaccatccagcttgctccattcacgtgcagacgatgcgctcaccccagcacagaagttctccgtcatccggcgtgccagcttcagcatgcttcgcttgccctcttgcgatatagctgcatgcatcaaatgcaacacgtaattatcagtattccaagccaagatatctgtcctacaactgcactggccattctactcgaacaatggagatattctttcagtttgtcctgtttgaatgacgtcaaccgaaatgaattccatgcaaaatttgcgcacagttgattccgcaaattgagctcgttttagatggaaaatggcaagtagaggttcagaatttcctgtaccagtcgagtcatttgctgtcactgtagcagaggacatgaggatggcaaggcattcgcattggcgctgcagcgtcgcaagccaacgcctggcgccaaaggcgagaccagaccgaaggagtggacggtagagctggtgcactgatgcctcatcgtattccgtatgctcaacccatgtgacctacagggtaaatgcatccgttagcccataaatgcacgcccacatgcatgtgtctttaggtgcaatacatcagatgagagctctgcagtgcaatacaacaccctactgtggcttcacagtgcagagcacatttttgtttttaccctaagttttcttcccctctttgctgttggtcaagtaggggcagaaacgtaaaaaatgtgcaaggtttgcctgttaaccagcctcgagatgtgaacctatactgttgaccaccaacaagtaacttggcattagcgtataatttgtttagttactaatttatatctggcctaagggttgagacattttgatctgttgttattcataagcaaacagactaagaactggattcatccgaaataatgtatcaagaaagcaaggagtgcacagtacgggaaaagagtacacatgagggaactactgaagaaagattttcatatcttgagcaacataaaaaaataacacaaagaaacaacagcagatgtctgtgcacatggattagccaacaaatttcaatcatttcgatcaagagtgcaacattgttaattcattgccatgcgatatacccaaacttctgaatgatgcgtgcaactagttttttttatttttagggcgtgcatgccaactagtttaagagttatttctccatctgaactcttcaagaaagtgaatgaactcaccaacatgatgtgcatattataaaccagcatgtgattaagttgacaaaggaatagtagaaccaaatatgtttcctaaaagcccctagatcaggtggtatttctactgaaatccctaatcccatccaactgctctttacttcaaatctattaaaaacagattagatgccggatatgttgttggtttgttcaccttagaaattctaaacaaaatgtttccttcattagtgccacagattgagatcaaattaagaattgtgaaaacccaaggacatagagaccaatttttcaaccaaataggagcaagtggtccagatttcaacatgtaagggacatattgattaaattgcggacaagaagttacccaaggtgcaccatccaaggggtagaagcatctaatcccctaggaaagttggagctaagaataaacaagcaaaagaaaacatgtttggggaacagtgttggatccacaaaaacacttaattattctaaataaattgtatactccatctcctcgttgaccaaacgaattgtttattttgggtagtgggctcataaccctaattaacctattaggccttgacttgtgaacactatgctgcatgggcatcagcaaatcgcaccattaaactaatcacacactcttaaacaaacgtcatccccaagttctgagcagtgcatagtgatagtggtagtggagaagtagtggaattaacatagctctaaaacgccggggtaaactttgaccagttacttcgatgtaaaaaatccagcagtccctttcaaaataaaaaataaaaagcagtccctttcaaaataaaaaataaaaaaaatccagcaaacctgttcagaactacaagatgacaatactattaactgacttactgccacattaatcatagtgaaccattattgtgagagaacagagaaaccatttaaatggcttcttgttagttgttaccttgcaatacccattgggagtgtcttgcatcacacagccggaaggtaccctcctacacttcacatttccacctgtgggtgccgttccagaattatgatctctcactaaaccatcaatggacacatcaactactgcccatgcaccctcagccagctgcttacaaaaccggagaaatgtaacctccctaattggtactagaggtgagagcacctgtagctcagccttcatctgttgcaagcaaacacaagaaaaattaacaattcagaaagaaaatatgttagctacgtcttacactatgtaagataaatgaacattagcactgttgatcagcactcaccagcagcaacgcgccatttctgcttcctgcaatgccggtagacacctcctcaagcactgttgccttagcaatcatgcacgagaacatgtcagaccaccgtctctgtgaaatgaatgcaagtaacaccaacattagtacattataggattggaacggaacataagtatacggtgcgaaatgtggaggacattagcccaaacctcatccatgagggtctctacaagggcaaggctgttgtcgatgatgactagaccggattccctcgaggcctcagagacgtagccggcaggcttcatgccaatgcacggtaggaaggagtgaagatactcctcaaagttgagcacctccttgctgggagaaccaggcagtgccggaacccacaatggatcgtccatctgtgccatcttgacaagttcgtccatcgcgctgattgcaagctctaagaacacggacctgtcgatgttacccaccagcgatggtatagcagccccggttgcgcgcgcaggcgtgatcaccgtgcccatcgggctcgacacgcctccggcgaactcattcatacagccgggtagtgtaccgagagaccctaagccaccgatgcctccgatcgctagctccagcgacgagttaggcataggcagcgagaggtgcggctgcagcaagggcggcggcgacaggagggagatgggcttgcctaggaacttggtggcgagggcgcacacgcggttgagctcgtccttgaggcgcgcattctcgatgcgcaggtgctgctcctctagggacacctccccgagcatggcggggctcccgcagctgccgcacattgggctgcgcatcgcctcccggatcgtcatgttctcggcgcgcagcttgtcgttctcctgcttgagaagcgcgttctcgtgccgctccagttgcgtcttggtaaaacgaagatcgcggcgcgcgcggggggatcatgaaaccgtgtcaggaaattgcacgaaacgaaccggctcgaacgccgacgagagaagaagactaaggcacacgatgcgatgttctcgcggatgatttaccttcatctgcgtgcggcgattctggaaccagaacttgacctgccgcgcatcgagggagagcctcctgctgagctcggcgcgctgcttctcgtccggatgggggcactccttgaacagcctacacaagacggacgcatcgatccatgcatgagaggacaaagagaaaaaggttggcacagaggagaaggatgcaaagtacgagcgagcgttgagaggggaatttgctttacgcttcgagctcttggatctgctgcggcgtgtggcggtggtatcgcttcttcctcttgcgggagttgctgggctcggcgtcctcgacgtcgtcctcgccggcggccgagatggcgtcgagatggtcgcttcccgaccggctgtcgttctccgcctcagtgtccctcgtcatcgcgccgcccgcgctagaaccagcgccagcgccgccgccgagcatccgcccgccgatgccaccgccggcgttgtcctgtcaacaaaatagagaatcaatcaataacctctcgatcgaggagaaaactctcgtgtctacgaacagctgacgcaaccccggtccgcgacagccgccgaacgcataccagcgcgagggagagcgccggcgaggacgcgaagccactggcgaaagggaactgcatgcctcccccgccgccgccgtcaaagaggcccccaaagctcatgccgccgcctcctcgccgaagcaaaacaccacggcgtaaactcgagaaagtcctcttccttggatctaccccgcccctcccacacgcctcacaacccgattcctaacccacggcccaacgaagaagagtaagagactactggtagagagataaagcctcgccgaggcgagcgaaccctcaaaaccctaaccctccacggcggacggaggggcgggagagagggagggatagattaacaaggcgagcgagcgagcgagcgagcgaacgaactggtggcgaggggaggggacgcatccgattaaagaaagcacttatgtacggcggcggggagataggaacgggaggagggagcaagcggagggtcaaaatggcaagtctagtgtggagacgaggggaggagggagaggagaggaggcccccccgtcgtgtggacgcgagagaaaaatagaaccagcggagcgtgggggtgaggtgggggcggggatggcgagacgctgacgacgctgaggcaggcagcggcagcagcagccgggttgcgcggtcaaacggccggatggatgcgtgcgcgcttagtattttgttgcgttccgcgtcgccttttttttttttttttgccttggtgcgggtgaagtgcacagcagagaggaggggtcggtcaggtctctcttgggtcagaggcgccggtgcccgcttcctctcctccaccggtgcgccgtacgcgccgtgtgccggcgtggccgttatgatctctctccggtgatctacggggacggacgggacacggggggatcgagcggtcgggagatggcgaggccacgttgtgcaggccggggttgggctggcgtccgtgggcccatggtcagtgggcgagccgcgcgggtgtgggggccgtgtgatctgtatccgacgggttgcagtttggtgcagaattgaatgcgccccagagaaaacacaggatgcctcatacagagctccctagcctagccagtccatgacgctgggccccacggtagccgaagggcccacggtcagtgtctttcgccccacgcacgcgtagatccgggatgaggaggggggaggttatggaggcgggcgttaatgcagcgcgtagccactggccgcggcgtgggcggtgggtccggcggcccagtgaacggcggatgtggggcccgaccgcggatccgacggtgggggcggcgtcagcggcttgctccacacgaatattgaggcgcttcaatggtgttacagtaggtggaagggaaccgtcctggctggtccggctggctggctgggctggaccggggaggagctcgggggaggaggaggcgtctgcctcacgaccagctcggcctatctttcgtaccatccccatctttggagagtgtttaatttttgccatgctgcgatcgtttggtgtttctgttgctgtcaagatatcctacgacctgatatagaatcttcattggttgttcatgggtcagtaatcgcgtcataaacagggctggatgtggccaatcatcaggcatggtatgcccaattttgatcacagtccggctttccagtcttgtaggaagtgaagtttggatggacagcccctggttggtaggtaccaaatcttatctgtcgcttcatgtgacgcatgaattcgggttcatctgcattagcgtcatccaaacactttaacctatgtttcctgtatttggttagtgtttatctactccctccatccaaaataaatagatctatcatatcttgtcacagataaataggggataggtgaggagatattatttcccccgcatatcatgaaaatgagatgaactcgaaatgcaaagcctaatatgtacaagtagtgtgttattttactattgattatgtttgtgtcgtgctacaggattattaccggcttacacagtccctggaggtagatgtgaagttacaatcttaccccggaggatacataggaagttactacaatatccatgtcatgctaaaaacctaagggtatggttgtacatttatgtggtccccatatcttttggcgctagcttgcaagagtggttagagtggttcccgaggcatctttccaaggaatattcctcgctcgacgacatatcacaccactacttcatcatttcattaggaatcaaggatcttttcacaataccctctaagggatggttagtccaaggcataagcagatgggagaaggttggatatggatcatgaataagctgccggagttcattaatccagccattgtccttaagtgcttgccaatggatggtccttatttcccttccgatgcataaaaacgatttctaatcttcacgctccatcagccctatttgaatagcacttaatttcctcttgtagtaggctctaacacttctttccaagcgtcggttatttgaaatttatatgtctcatgagtcaaaaagtatttgctacaagtaaaacctttttggttagaagtacaagtcgagaagtatttaccataagtaaaaccctctttggttggtgagaaagaaaatgtttcggtcgaataggggatggagtttgtctcctgcttcaacacgaaataaacttgaaggacacctttagaacggtgattagaaaaggacatagaaattggacacggttgcttgtgtaaaatagggattataaaacaaataaagacttgtagatatcgtaaggtacactgttgaaaactttacatgcatgttaatgaatatactagaaagtaaagctatgataaatcaatacagtaagtctatggccatcacgtgatcgcacttcgcttgtcattcccacgacccacgggaagaaaaagaaaaagaaaaaaagctcatagtgcatgttttttcccccacgtttttccccttgaaatcgctcgagtaggaaactttcctttgcttttagtgactgattcaagtaaaccaaatggtgctatagtacctgaatccttaggatcttcaatctttttatttcctttgatttttcctctagtccaaaggacccctaacaataataggaaaagaccaaaatactcattattcattatcaatagaaaaatattagtgcgtggatagggtagataaaaggtattggagaaagatacaactgtcaaattttgtgggccgaggttaagtaagatagtagaaaccaatttatttgaaaaaaaataaaactctataaattaacttattttgcaacgcagggagtatgttcttccaatattccattatacaaccttgtttgttaccatgagcatgcaacatattttaaaaaacttggtattataaattactaaatttggatttaataaattgtaaaaaaaaagccataaaaagtatcatcaacagttgaaaaaaaaactaaatacatcttgaatatttataaatttcgaaattgataaaacctttttttttgtgttgagcgaagtgagcgtaactcaactgattagatttcttcaggtggaactagcccacctaagttcaagtcctatatttgacatgcgttttcgcatttacatgtatttattactatattggtcctatccagatttatggtactacgatttatctcatctactcaaaagttactatattttgcgacggatggagtatttaagtggtaggcaatgtacatatcgataacgaggcgtctgtggtgattttgaaaatatgatgaggtgtccatggtgacatcgaagatatgattttatcttcttcaaattatcgtgagaatttataggctttcttattagtgtgggaaattggatttatctcatccactcaaaagatactatatatattttatgacggagagagtatttaagtggtaggcgatgtacatatccgtcggtgagtttgaaaatatgatgagggcatgatgacattgaagatatgattttatcttcttcaaattatcatgagaatttataggatttcttattagtgtgggattttatagcctgttcacctttttaggattagttaatgtgacaaatgtaggagacctctaattaacatgcataaagattgggcattttgaggaaactcctacattaaccttaaaaatcttgcaattggttagaccaatggtgtgtttagatcgtatcgagagttggctttaaactaaatatgcaattgaaaaataccaagcactctttagttttagttgttctataatgataaataataatgtgaagttctatccatcttggctccgttcgggggagtttttttttggggcaataacaactgatgaactctagtatctctggctccgtcgataagtaactacataatcaaaagaaaataaatggttattttagattgatgttaaattatgccctaccaatttacacgctaaaactttcttcaccatatcaaatatatattggtagggaatcaaacatatataaaatatgaattccaccctatcaaagaataagtagcaacaaaatttagttagattttggccatagaattggtaggtcactaaaccaaacaagcccgaactagtggctataagctgagaaacatagctattttcatattttcaaaactcgttaaacaatggctttttctcggaatctctagctctctcaatcataatgtaaatttcgatagttataagctacaaaatatacaaaatggtttagtagacaaaagttgggtaacacggcttatttagattatcaccagttgggattcttactctttcctagaatcttcaattccccaaacaaggtcttgaactctaaatatattattttgttaatttgattctaattttataattagtaattaacaagttgtacctgatgctggctcttgttttagcttaagtccataatttaatatcttgccaatatatgtagtatataactaataatcataagtgctcccttcgtcccaaaatataataatttctagcatttagaatttatctcaaaatataacaatttctccaccaacattctcttctcaaccaataataaccctcgaccattcaaatttcccacctacttccacttcttttccaatcacagcactctcatttaatcataccaactttcttataagagcgagtacagtagcaggctataagtcagctgtaagcacatgtagaggagagaagagaaagagaaaaaaagcgggctacagatttgtagctagttgcaacacagtcaggtgtaaacacatgtggaggagagaagagagagaaataaagcgggctacagatttgtagctagctgcaacacggactccaatatgttgtgggtgtatgagagatgggaccatatattaatggtgtagtatatgctcataggtaactattgtataaatgagctattacattggttataaatgatttgaagctcactactaggaaaagcatttttgcaagcggccaaaaccaattttcgcaagcggaggggaggaccgcctgcagacggacgacggtgaaaatcatccattttcgcaagcgggcaaatggcccgcctgcgaaaatccaataaaaaacaaaaaaaaattgcctcgccgccaccgccgccgcagcaccgggagccaccgccgcagccctcccccggcctccctccggccggatctgggaggggaggccgggggagccgccgccgccgcgtacgcgcgccgccgccgccaccgtgtccgcgcgcgccgccgctgccttcccccggcctctctccggccggatctgggaggggaggccgaggagccgctgttgtcgcaccgggtcgccgccgcgttcgtgcgccgccgccgccaccgcgtccacgcgcgccgccgccgccctcccccggcctccctccatccggatctgggaggggaggccggggaaccacgtcgccgccgccctcccccggcctccctctggccagatctgggaggggaggccggggagccgccgtcgtgtccgcgcgcgccgctgctgccgctgccgcacgatccaccgccggtggagggagggagggaggggaggggaggggatgggggagctgagaagctggtggtggagggagagagagagagagagttgagaagatagaaatgagtggtagggacgggttggagtactagataaggtttgaagttttttttaggtagatacgatttttgcaggcggaccacataaggtgcgcggcgcggcttaggtggtccgcctgcgaaaatgattttcacaggcgccgcttaagtagtccacctgattttcgcaggcggacagcgaacttcacctcgatttatatttttgtaggcggtcattcgactcctaggctcatgtccgcctgagaaaaaaagacccctacgttgggaaaaatgctttttctagtagtggctagtagttggctacaaggttgtcagtatcccgattcgtatcctagtatcttacgatactacgatcctaccaagccaaaacgataccgatcccacctagtatcctaattttcatagtatctcgatcctactattcattactatacgatcctacgaaatcttatctggtatcccgattctacgatccctacgatactacaaaatattatttaaaataacatggtttgaaaataatgtaactaaatatgctcaaatttatatgaaaaatcggttaaatatatcaaaaccaacgtggtttctcttgataaatatctctatttgcatgatatatatcattactacattttttatatagaatggctatatataattaatataaatattaattaatttattaaaaagaaaatctcatagtatcccgatactacgatacgatcctacgatacgatattactttgagcaaaacgatactatgtagtatcccgatcccgatcctgacaacattggttggctatactattaaatttactttaactgtgtctaattataaaaatgcttatattctgttttgaagggagtaaaatactaataataatatcacgtgcgatatatggatttattactagtggccctaaatctgagacctgaatccagtggatatacaagcctaaacaaatagctccatgggaaaaatattactatacacataaaatttctgaacctgacctgtcacgatcctagatagactactccagttgattggaatttggaatttgtttaaataaaccagattgctgattatttatacctggaaagcaagtgacacatttcaccatcaatcaatgtgtacaggtatagcctctccaaccaagtctaatggcgagaaagaaaaacacgctcaaagacgaaagggacgcatgttttgatctggtatgggttttgacatggaccagtagcaatcttccaaaccatggccgaactcggtgaatcaacggaaagggaacgctcagatcctacttgagtagtgagtaagggggcacacatgggaaactgttttaaactctcgggtggacgttcacccgtttcttgcatgtcatttaaatggttatgaaaaattttcaaaaaaattgacataataggttaatatgcaatatatcacttcacaaacatgcaagtttaaattcgacttttacaagttgtaacaaaaataacaaatttaagtgtgaatatacgtataccggttagagtttgatttgttatttttgttacaacttgtagaagtcgaattttaacttgcatgtttgttaagtgatatattacatattaacctatcttgtgaatttttttttggattttttcataatcatttaggtggcatgcaagaaacgggtggatgtccatccgagagattagaatccatcctcagacacacatggataatgacgtgaatatatatatatatatatatatatatatatatatatatatatatatatatatatatatatatatatatataggctttttaattcctcgcgtcacttttgcagaggccgggctgctgttcttcgtatttattgcaccgtttttgctacgcgagaatatcaggaattcagaatacgacgtctgctaatgccgacattgtttggaagtcccagtgaagcgaaacgaagcgcccgtgaaaatgctcggaaggaagaaagaataatgttgtcgtaggctagctcacagcatgaatggctttagtgtggagtgtttttttttctttttagaactgtagtgtggagtgttgatatctacagctgtgtttagatcaaaccaaaattgaaattttgattaaaattaaaacaatgtgacggaaaagttgaaagtttatgtgtgtagaaaagttttgatatgatgaaaaagttaaaagtttaaagaaatattttaaaactaaacacggcctacgtactctcatacagttggaatgtatctttgtcagctccagagaccgacggttgggacttgggacctaagaccgtctccaacagcggagacccattctagatactcatatcatggattgggtgatgcacagtaaaaaggtcggacactcaaaaattcccttctccaacagcaaacccagtgctcccaatctttttctatcttcacctcgtcctcccgtcgtggcagcggcatcagcggagcaggcgggtcccagccctcgtctctcctccctcctccctccggcggccatcggctccaggtcgtcctcgcagcggcgatgcgcgccgttcatcctcacaggggcggagcggcgatggccaggcggaacgctcccgccggcggcttatggcgcggcccgtcctcgcgacggcgttgctcggggcggagtgcgcccgctggcggctcgcggcacgactccttgcgacggctgtggtcggggcggagcggcggtggcaggcggagcacacccgccggcggctcgcggcacagttcatcctcgtggcggcgatgctcggaacggagcagcgggaactgcgacgaccgcgctccaccgcggactcgccccgccggccgcactccgccctgacgccactacgggcccactacgcctcctccccgacggcgcgctccgacgacgctccccgacggtgctccccgacggcgcgctccgaccgcgccccgacggcgctcccgccccgccgcgggagctccgcctcgccgcaccagctccgcctcaccctggcccaccgcgcgactgcgcgagctccgttccagtgttttgcgtcggtagagagaggaaacggatatttgcctagcgctttggccgctacccaatatacgtatcgtatttgcctctcccgttggaggctgttttttttacccaaaatcagtgtgcacgacggataaatgagtatgcgtcgcgttgttggagacggtctaaaacgtttttaagctctgttgtaatttggcagaccagtggactgaacctgaaacgcacacatgattaattggtgtgtgttcagtcaaaaatactgtttggttgatgttttcagtcaagacaactgtttggttgactggctattttctgttttccactgtttgagtgggaagatgcagaaaaggagctgacagcttattactccctgttggcatgtttcctttcaggctttcagatgggtcgggcttgccaagctgggctgctctggataaatccgattccgatccgtattggaataagttcaccgaaggtcccttaaccacgaaacagaaatatctaccctaaactcacttaaaccgttcaatggaggtcccataacagttttttttcctggttttactaacgtaacatcctagtcaataaaataaaaaataaaaaagttattgggcccacatgtaagtgagaatgagaaaaaatgtgagacccatgtctcttcttttttctctttcttcttctacggcttgtttggtaacatgagagaaggggattgggagtttacacgagggaattaatggtgagattaagatgagaatttgattttttatcccagtctcttgtttggtagaggtggtggaaattgatagggagtttaattggagattaggttattaatgaaaacggatggctgagatttgtttaggccaagtaaaggaggaattccctcccaattcccaccccctacccaggtattaaaaaggagagagttcattcctcaattccccatccccatcccaccaaaattatcatgtctcccaatcaaacaaaacagttaatagcctcatccctccgaactcccaatccctcataaaaactctctccaaccaaacaggccgtatcttctcatttctttcctctctccctttttcgtttttctctttgcgacaggggagcagcagtgggcggcgacgagtggccggagcaggcgggcaagcgcgcgaggaccagcggagtggagtggggtggcggcggcggcgagcgagcgcgcggccggcagagaccagcgattgttccagtcctatacataaatcacagacggcttgtttggcaacctgagggaaggggattaggagtttacacgagggaattgatggagagattaagatgggaatttgatttttcatcccagtctcttgtttcgtagaggtggtggaaattgatagggagtttagttggagattagatcattaataaaaacggatggctgagatttgtttaggcgaagtaaaggaggaattccctcccaattacctgcccctactcaggtattgaaaatgagggagttcattcctcaattctccatccccatcacaccaaaattcccatgtcccccaatcaaacaaaacagttaatagcctcatcctttaaactcccaatcctcctagaaactccctccaacagactgagagaaacgaatgaacgaggcaaatagcaccttcttcatgttggcctccttggactcccacggcatgtcggagttgttttccggcgaatcgaggtgctgcacagcaagcaaacccacaaatccaactcactatcatcctcagacaaaacagacagatcagggaagagggtaggggtggatccgagggaaggggcgcctcacgtacgtagttaagcgccgtggagaatagcctggaggagcagcccgcggcggcgtaggagatctgcaacgagatgtttcccccaagggagagatcaggacggcaaagttccgcgacgaacagagagatacaggggcatttggagcggaggggctcccgccggcggcggcggcggccgtcggctcgctctgggcgtggctcgccgcccccctcctcctcaccggcgtccacgccgcctgctgccgccgctcgcccgctgcgccacccggcccccgccccccgcgtcccgctgactaggattgtgaccctactacatttttttctcgcttataggtgggtttcacatatttattttttatttttttactgactatgatgctatgttattaaaattggaataaaagacctgggaacggtttgagcagttttggttttatggaccttaaaaaatctcgctgttaagttaagagacctatggttaacttattccatccgaatttgttctgttgctcagcccagacatccgcagccgggggcatatcgtgcagcccaacaaaactagcgaccattgctttgcaggttgcagcttggctctttgccttccatctcccctatagaataggagacgacgcggctgcaggctcacacatgacgaccgccggcgtctcgacgaggagcagcgagcgcgtgcagccgtgcaggtgagtttccttttgccctaaccactaaatcctccaatttccaatctgcatataaatttcgtcctcttaaacaattttttttgtccttttaggtggtgttggaaataggcacacaagacaagagcccaggttatattcctagatccaacaatggtaaaaggaacataactagatgtccaactgcatgaagtcatagattatgtgaattggtgcttgtggagagaatgactatatcatattagcacatggtcattagtgaccactcatcattgaccggtcacctgttcagagatgagggttacaacccatcacagatgacttgttccgtagtagtgattgcatcaatccaaaatgacatagggtgtgtttgaggagaaggggattgaggagatacgcaaaacgaggtgagccattagctcatgattaattgagtattaactatttcaaatttcagaaatggattaatatgattttttaaagcaactttcctatagaatttttttacaaaaaacacaccgtttagtagtttgaaaaacgtgcacgcggaaaacgagaatcaatctcccctatctccccataacgaacagagccatagtatatattcaaccgcaagctctaatacattcataatccattatatgcatgtagacacaacatgtgggtacaatagacgactaaccactcatggaaacaatcaaacagacaacaagctcacaatgccttcaagtacaatttagctacaggtgcaaatacatctaaattactagtccaatattatggaggtgccctaaaacgacctcaagcttgagtgaagcttagtcttctagctttctttcttagcttactagttttcttccttgttttttatactcctcaatgttgaggcttggaatctaggaattcctgtaactggttggttgtgaatgcaaatcagctaatggatatataggcaagatttttatccattatctgaaaaaacgacctcaagctagtttccaactgacttcatcacctaattaagcatatgccatttctacattgattatttcttctttacttagctgcaactgcaaacacgctatatttttagggaaggagacggagagatcttccatgtcagttcttagggaagaactgaacatggaatccatctgggaagctgaggccgggggtacggactatgttacctccttttactgtcttccatctggaatgacaagatatatgcatatgttagaacatagatattctcatatgcatgccatgttcaggaagagaactacatgtacatgtgtgacaagtgatgatcagctgcatgtacctgtattttgtcaccaggtggtgtatgaaagttgcaatcaacaccttgctgagatcagttccaacacagaaacggaggccacctccaaaggccatgaaatgcttcgaaccaccggtgatctcaaccttgtcctgcgcaagcaaaacccagactcccagaggttagtcaaaactcaaaacacaagacatatgtttaatttctggtcacgaatgcatgcatgcatatgcaggctagctagctagctaacttctagaagcagattctactattatgggctgcctcctttctttattcctacgtgttccttatcagaagaacagtgagtgttaagtaacatttgacaatatatatctatgctgctctatatataacatgatttgaccaaccccacacgtaggccaatcaccttgcacaatgcaagattcatcccctagatcaaaaggcaagataggtttatttactcgcatcctgtatctatgtccccagtccactatttcttctctgctttcgttgggaatatgtgaaatatcacgtgcttcacctgccgcaacgaggaactgtctgattattagaaccctgaatcccagacatgctactgtgctagtacattacaggccggaaacagacacaatccgttgtaaaatatacaggggatttggtaaattctcccatggtgattgctcagtttgtttagctatttttgacaattgttttggttcaatttctttcttcctttttttttttgacagttgtggactgcaccatgcttgtatatactttgcctatccttccaagttgaagaaagctggggggactccagaattgatgccaacactgaatcaactgaatgttgggttcaataagtagtagttgtaattagtttattggaaaaaaggtaaggtgctttattgttgattaaagtggctatacttcagactagaacttgtgctttctgacactcatcacttggaatcctggaagaaataaaaacaagcaacaccatatatatgactgctacctgttgcactctatatatcttgggaatgagtccaacactcaatccagagagcatcaaaaccacaagtgttaattgcatctgaaacggttttgagggaatttcaattagttagcacatagattaaacggcacaaacctgccacctccatggattaaacgctaacggatcttcatatatttcgggatttaagtgcactgctggagggcacaccatgactccccatcctgctggaatggtgtagcctgcacccagaggtgtagaagaaaaaaaaaaggcttacattcatttttttttgtcaagttaaagagcacgtttgttcatacacatcatatgtatatctagcttgtaatactatacctttgaattcaatgtcctgcaaggccttccgaaaaatccccgggacgatgtttgctaaccttaccatctccaacgtgaccttcatatgcagaaaagttcaagtagtcaaaaatagtattcactcaactaatccattagtccctccaatttagtcccttttagtctctaagaatctaaacagggacaactaaaaagactaaaagtgcatattgggactaaaatccagtaatccatcctggaggtacttatagggactaaagtggcagcctctctcttctctctctcttggtttacatgcttttagtccctggatccaaactacagtaggggactaaagtttttaatccatgaactaattttatttagtctagagattaaatgatccaaacatgacctaaactgaagcaagtttattcagagcactactagttgtgaacacatatgtatataactacactatcttctctctcgtggagagtgcgcgggtgcacttggtttacacaagcacgaaacacaaagtaagcagttgcacaatcgcattggccagtgttctgcttgtactttgccactgtcacaactaagccaacaggccactggttaatccggctcaatgtcttatactattatacaccggccgttcaacttgcacttggctaattaactgctagctaactatagctagcccctggttaggctcacctgagacgtgaaggtcatcgacttgtaatctgcccacgtgaggcctgcggcatcacacccctccttcctgcccctaacaatcgcctcatgctcctcctgcgccacacaacacaagagctgtgtcatatgttgtctctcgttgattgcgcgtgtttggggtttcatcactggctaattagttagctgctaaccgttagcgcgtcgagcaccgtggggttctcggcgaggaggcggacgccgagcgtgagcgccagcgacgtggtctcgaagctggcgaagaggaggacgaacatgaggtcgagcgcgatgccctccgtcagcacgggcttctcccgccccagctcctcgatcagcacgtcgaagaagtcctcgcattgcctccccggctcctccatcctctccctcatcatcttcttcagcaccttcatcgcgttcctcctcccctgcacgcagcaaagatagcatcagctggtggctatagctaaattcaggcaagaagctagctagcgctgccttggtactgagccactctctagaaacattgactgcctgcaggctgcatgtggtggtgcgtgtgcatgcatggtcatctgttgactagggaacgcatgtgcaggcgttgttcagttcactacgttgctgctcaaggatgcattatattgtacatgcatgtgcactaacactacataccttcatgcactcatgatatgcagtgccggggatgtccaccgggaacgagatgagcccgcggatgaaggcgacgaagttcttcctcagattctccgacgactttgacggctcgtagctgatcagcttcttcgccgtaaggtcaaatatcatctagtatcacaagttcccagatcgatatatgtcagaactcagaaatggacagcatgagttccaaacatatattagcagcagggatacggatggattggtggtgatctcttacggcggagatgctgtccttgagctcgacgctgggctgcgccgcccatgaggcgaggctggtgcggcaggcgcggtcggtctcgtcgaggagcacggcgcggaggttctcctggccgtacagccggagcacgaggctcttgaggtacttgtacatgaagccgtggagggagccgacgttgtcgcggccgaagatctcggtgaaggtgtccgggtaccagctctcgaacagcttcccctcctgctggaacacgtagtagttcatctctgggtccgccgtcaccaccaccggcctcccgacgacgctggtcttgaagatactgccgtacctgcacagcacataatccaatatatctcgtcaggttcagtaatcagaaatcagctgctgaacaagtgtttttatctgtaaaatacaaaatgttacctgttcaacctctccttcacaaagggggagatgtcgcaggtagtgttgggtgcgaagaactgcaaggtctcgccgagaagagggaggccgagggagcccggaggcagccggccgtttgctctcgggtggctccatctgtacgcccacataacggaagccacgaccatggccatggccacagcccacacagctacacagaccagtgtttccatggcctctccaagacctggtttctcgcacactgctagggcaagaggcaatggcggtgcttagctaggctaggcaggcaagggaagctagtgaagatatggttttgcaagtaccgagagcagggtatatatagcagtgcgtgatctgaagggagattacttcggtttatataaagttcaggccagcataaacaaatggatcgaaggggagagtgcaggaggaattattgccacagaatccttccaagtgttcctctttttgacgggaagaatccacccggaagcttgcgctctgctgctgtgctacggagactgtgatgcatgccacaggaattcagctgttatgttctcagcttttcagatcggctgcctgtttaaggctggctggctggctctgtgtgcgcgcggtttagcatgaaaatttgataggcatgtacgtgttgcaacggattgccggctgttatccagaccgtgattgtattcttttctcactggtagagaagatgccattagcacatcagttcaaaatgttaagctgttatgtctgaatttttcctaccgtgtgtttccaatttcttaatttctcttggataggccccatttgagttagttaatttctgtgggaatgaaccgtggccccctatctactactaggaaaacatgacgcatacatgataattaactcgaaaaaatagcggcagacggataagaggggattgaatatgcaccggcacagaaaaaaaactacgatgtcccgatcaatcgagcgcgagtcaacaagagttcagctatatttcgtttttcttatccatggatacatctcacttgattgattggtcgttgtgatcagcgtgcatcgatcgatcgagcaagacgtctcgatcacaggtgtggtagacccagccgtccagctcccagctagctagctgcgaactgtgtgtgcatgtacactaaacgtcctttcgttccaacctgctttatactgatatcgacagctatatatgtcgatctactcctagcaggtagcctgaatccagcacagagggctcgttgcaatgttgcatacgaacgtacgtacgtactgtacgttcagaagcaagagatagatcagatcgatcgatgaagagatcgcggaatcttcccctgaactcatcagcagccgctagcttaattagctagctagatcacaattttagatgacctgatcatcaacttgatcctcatcactcgtcagtcgtcgcatcacatctcacatactactatatgagataattgtacatcaatgtgcttccacgtactacgtactgccacctgtatgtgtgtgtgccagtgtgtatgcatggcaatgcgagtctccggtctcttcaggttcgtcatgccatgcctgccgccatttttgtctgcatgtctgtcggtcgatcacccgtcggatcgagcttgttcagacaaattcagatgttcatgcatgcacctgaatgaattcctgcatataatcctactatatagtatgtgcgcacgtacgcgtgttcgttcgtggatggattggtcagacggatactgcaccgccggcgacgccagctctgcgactgaacgtatgaaaccgcgggacacgcccacgtataccgtatacgtacgaggtatgcacaaatgtcccccacacgtagacaagcgcgtattgacatatgagatcgatatacatgacattttcagagtggtgtagattcagactcgatcgagtagatgttccctagtttctgcgagcaccgtgagtccactcaagcaagtaatcaacgaattattattgtttccttcttgtctatatgtgtggctttcattcagatagagatcgatgagttcagaattcagaaatacaggacgggcgttgaggattcagatccaatccatgcgtgttcaggttccattttaagacgagcatatcctactcttccgaactcgttgaagggtgcatattcagaaggctgaatcctaagtatgtctcgtgatgctgttgttaattgtatcgttgttcgcgtggtcagttgttaaatccagcagtacacctgtaaaaagtctctgaaccacgagcatggatcccctgtagatacgcccgcacgatcgagtcgtttactctctacctactaccgtataatcgtaacaaaacaaggggaacagcagtttggatgacgatcgacagaagatccatgcaagtaccaagcgatctagctaaaataatttgttcatcgataactagatgccgcactaggtagctttttttaagataatagaatagagcatcccgacctttgctcaaagagttacagccaattattacaatctgtagcgcccgttccgtcgtggcgcctagcgggaaaaattatctcttaaaaaccctaattgcgaattttgtttccttgcttgttgtctagtgtccgtgccatctcaagatctcaatccccgatctatcgtcgagttcaaatccgaatccaaatccttccaaatcaaattcctccgcaaaagtctattttgcctcccccgggtcgatgggccgaatctcgctcggcccatctccctctctccctctcccgggcgctccctctctctctctctctctctctctcgccctctcccctccccggcgcgctccgctttcgcccccgctcagctccgctccgcctcgcccgcgcgccgcgcgcgcgtgcgcgagagccgcgccgcgtgctcctcctcctccgctctgcccgcgcgcgtgcgcgtgagccaccgcgccgagcgcccccttcccttctcctcgctctgccgcgcctgcgtaagccgccagcgccgagccaagtcctccctctctgctccctcgctgccgcttcccgcacgccgtgttcgcgtgcgcgcgcccgcgcggacgccgcccgttgcaagccgcgcgcgcgtgctgagtggccgaccgcccggtcgccgccgccgtcagcctctgcacgcgtctgtcgcccgtgtcgtcgcgccgctccaaaccgcccgccgtcatcgccgtcgtcaccgcccggcccccgccactccgcgcgcaagccgccaagggacggaggcagcgcccctcctccctctgtcgcgtcgcccccgctcccctcctcctttttcccgaatcggcaaaagggcaagcccctttctccccctcctttttcccctttttcccccgccggcgtcatcctccctgtcgccgctttggccgcgaccgccgagcgccagctcgcgccttgaccgccctaagtcggttcccaaaccgacattgccgccctctttaaaccccagctccttcccctccaatctccctcgttttcgcctcctcgccatagctgccgcccccgtgctctgttcgccgtcaccgttcgttgttgcgcgtgtcgaaggagttggcacgagcaaggacgcggaaggggacttcggccgcgccctctccttcctcttccccggcccgaggccggagagattactcccgcgccgtcggcctctcgtcacagcgcccctcctcatctcggtgatgcctccctccgttcttcctcctcgccccatctcctccctctagctttcggtagtagctcgagtagactccccgtagctagccggcgccgccccgacctttgccgtcgctcgccgcgtgctcgccgccgtcgccgctcgagctccgtagcacccgcacgtcgccagcctcgctcggcgtagctccgtccaatccgacgctagcatcggattcccgtggtcgcgtggatgctctcaccgccgggaatcggttcctcgtgacctcgtcggcgtttccctcttcccaccccgccggttgtcgccgccgcgattcgccgccgtcgaactccctctggcgaatccgacccgttggctcgtctcccctcatcacgaacaaccgcccggtgtgctagcttttgcccgtatcgccgtggttcgctccgccgcccgccgccgccgcccgccgtccattcgcggccgggtcgtcgtctacctcccgccggcccgcgtggcagccacgtaggcgccacgtcggcgccagctcagcctagaccaggtcgagccgaccccggtcagtccctccctgtgcgcgcgttccaccgcgagccgtgaggctgcgcgtgggcccgccgcatccgcgtccaccgtgaaccgcgcgcgtgcaccgcgtccctcccccgcccgcgcgcatgagccgcgtactccctccgcacggtgagccgagccgctgacaagcgggtcccacccgggaccgcgcatggtgagcccggtccaccggctctctctctcctccctcccgcgcgcgcgcgtcttgggccgccttgggccaccttcttgggccggccggcccgttaagctcggccgagccgccctttctctcgggccgcgccctagccgcccgagggaagtctatattccctccctctccctttttcttttcttttcttttccaaaaaggatttaattaaatccttttcctttagaccaaaaatccaataatcttagaaattcaatatcttcccaaccgtaaatccgtttgactccgttcaaattccaaaatttctcaaatctcgagatctatctaatggcacgcttagaggccattaatagggctttattttcgccgtttgttgagttgtcccgttttgcgtatagtttcggagcccgaagacccgcagtgcgaggatttcgaggatcaagctccagatctcgagcaaggcaagccacctttgaacatcttgagcctatatttgaaatctaattatattgcttgcaaaatattatgcattgataggattgcacttaatctgttgttccgtctgcaaggcagattggcagacctacctaacttgttgcatttgatccttccattgttaattgctataccatgtccccttgtaaccatccagttgcgcctcgatattcgtgcaccctgtgccagtatcgacgatcgccttcaaacttaaaatctgattaacaacttgggtaaaactggagttttacaaaaggcttggaaaacccgacacctgggtcggtgcttgcgaactaaatgaatttccaaaaccgcggaccgggcaacgtaccgggtgtacggtttcccgctctcgcacttaaggaccgattccttggaatttcatccaaacataagtcaagtacgaccacatgggtggaatgagacacccctggctgagtaactagcttatcaggggagccttgatgccgagagacatgtggattcgccggggtggtgtcggggaggacccctgggcttcctggcacagtatggtctgggacctaacctgttgttggtctgggacccatctcgtcggcatatggtaaacctatgtcggctttggaaatgccttgtcatgaaagcttggaggtctcccgacgtggctgatccccacgggctgggtgatccgggttagtaatgtcgtgtgggtaaagtgtaccccctctgcagaggttaacaaactgttcgaacagccgtgcccacggtcatgggcggatgtgaggtgattcctagcgtagtttggtttgactactgcttgtgaaattgctgtgtgaaaagggagttcggtgtttgaaaaatctgcagctgatgggatcagctaggcccggatggccgtttgaaaagttgttggcccgggtggccgttgaaaaagctattggccgggtgccaacattgtttaaattctaaagactgatacattgcacatactccgaccggacgagacgcactgtctcatccgtgtcgtttgagaagcactcacttagttgtttcagaaaagagtttaaataaaattaattgcaaaaacactagtctttccttgaagcctgcattaaacacttacttcccatggcttgctgagtactctcgtactcacccttgctctatataaataatccccccccagttgctgaagaagatgaaacggatcctgctgatgaggagttcttccaggagcaagccggctacgatgagttttagggtttcggcctagttcccaagtcgcgcctgtgttgattggtccaagtcctggcttccgctttccttttgtaatgcagttgtgagctcgggatctgtccgcagcccaacatgactgtacatctactctataataaagagacctctgttgctgtgatattctgtctccctgtgataccagcactgtttcctgggactggtatagattaacaggttaatttggagcgtcacgggctagttccggtcgggactagttcggggcgtgacacaatctcacactcaaaataagtgaagttcaaagaaacttaaaagatgaaaccaaccatcaagaagaaacaacctaaaaactgccaacccaaaataaagagtacacaattattgaattttgtttgtgaacctccatccaaaattgacaaaaagttgcataaccgttttctcaagaatacggcatgcagcctttaaaagctcactatcttcctcacacttttgtagttgtgcccaaaacaggagccaatgtgttgccctgaaaactacctttagtctgaaaactacctttagttttgccgcactaggtagctagctagcataccaatagtgcaagcaactgatgctagattgtgcctgcacaagtacagcactggcttaattcactgcgtattaggctatattagcttcgatacttctgctatgtgatgtacagtactaccctttccagttttgggcgaagcttagacaaaatctcagttcaaaaaactggggacaaatctcgatagaggtgctatacatgtgtggcattggctcgtcccatgtgatcaggctgggtaagaaatagtatgcaccttgttgggtttaaaattactagtacacaagtatatactcccaccgttattaatatacaatgccatcgacttttaaacatacaatcgatcattcatcttatttaatattttttgtaaacatactaaaatatagctagtacagtggtccgcacagattttgtagctagtatctttatattttctctcatatatgttaacaccaaaatttggtaaaattctttagtggattcggttaagaaaatagcacaatcagctgataaaaagcttatctagatttccagaagagtccgaattcaagaatgaatcatggagaccacggtatggcaacttaatttatccattaactaagcaagttttgtatttaggaaagtctgagtcatatccgatgaggactttatgttttttttctttttatccttaggaaagtttgtttagtgtccgatcaaaacatatatcttgccttttatctttaggaaatatgtgttgtgtccgatatggactagtatctacccatgggtataaatatgcacacacagggtctatgtaaaaatctctcgatcaatacaacttcgatgtatcgtcaccctttttattttcgtctttctcgatgagttcttgtttcgagttggactgcatcgattcgatctccgatgaggggtaaggcttgttatggttgtttgtatcggtggggtagggtctcaacactataatcttgtcgatgtaaacacctatttatcatatatcttaattaatctaggtcgatgtttcaatttacatgtatcggcggatctttttatagggttttgttggtatcagttaaattgtttcatcgatttagattagctaaggtatccatcaccctgaaaattaaccaaagacttaactgtttagactttatgcatcttttcatacttagtgttgcatcagttgagtttgatctactaagtcatgcttagaatcataaaaactaatctgcctttgattgtcgataaaggtttcatcggggtttctgccgatgagttatctggatgttgcatcagcttataagaattatatacaagttgattttagcctattataacaaaggtttcactgattatctaatcttgtggatttaatgttatcgaaacaccagccgagctatactttaaccttcagatcaagcaattattctatcatattatttgaccgattggtttctattgaattatattattgttttattacattatcatcagtcaattgctcaaaaacctatcgacatcggctggtatcgacatgggctagtgttgctatattggcttattggtcgatcggctcttttatcttgaattcatacatcttgtcagttgcaggatcaaattgacactagtggacaaaccatttttagtcagttgcccaaaaaccacaatagtcctggttgcttaaaaatccgggactaaaaatcatttttagtcccggtttaaaagcacaacgagactatatgaacacaaaccgggactaaagattatatttagtctcggttccgtttgtgccagatgatgtcagggcaccagaaataataaccaggactaaaaatggatctttagccccggttgatatcaccaaccgggactaaatatctccctcccacgtcctaccacatccttatctcttcgagaccgagaccaagtccttatctctcgcgcggccttcctcgcctctcgctctctttgttctctcttctctcgcctgcctctctctgtcgatctctgtatctttcctctcctctctcgctctctgggttagcggcggccgtgcggggtcggcagcggtggccgggctagggaggcgcatgcggcggcctcgcgctcccctccgccagattcggtggaaggcgaggcagcagcggccgggtggcggcggtggagtgacggcggccgatcagaggaatttgtttttttaggatttgtgataatttttttttgagaatttgtgatgtgttctgtgatgcgaatatgtgatgttttttcataatttgtgatgtattttttttagaatttgttatgtatttgatctgttatttggagatgtaatttggagttaatttggggatcatttgggaatgtagtgaaatcaatatgcaaagttaaaaacaattaaaaaaagaaaaaaaactagcaaccgaatctggctctgccatatttagtcccggttgataacactaaccgagactaaaaatggatttttaatctctgttatttcacctgggactagagatacaagatagtatctttagtctcggattcatgctactagttgcataaccggaactataagaggttacgaactagggtacgttaaagaccctttcttcagcagtgtgtctggcacatccacatcccattttaggacctacactggagttaaaagtaggtcttctaaacctttgtgttatttttcacgtcaacagcatgactactcggctactcctacgagtaatctcgccaacatctaggcctagaccctggtacctgcaacctgcgtggaaacgcagcaaaaccgcacatcaatcagcctggttttatttattcatcatttgacgcattgagatcgagctagctatttcacttagcttcaccttccccaatacttgctattagcttcatgtatgtaacatatgctttattaatttccgccgtcggagaatgaactcctccaccagggaaccgtgaggcccccctttgtgagttcggccgagggcagcgggtgagattcgagggcttggtgagcgaagctgtgtgatcttaagggggttagtcccctccaagacgatgagacaaaagaggtttatacaagttcgggccgctgagaagcgtaataccctactcctgtgcatgattgattgaatgtagaacacaagtgcttggggttgcaagacccaagcgccaattcgctcggaagtccccccctccaccaccaggcctggacctccttttatacctcaaggggttaccacatgggcccaaaaacctaacctagctccggtggagaagtattataatctttgcattaaatgtatgtcttgtctcttgacttgggaagccaagcacacatcgtcttgatgatggggcctgtcaaatcttgccgcctgacacgggaggtgcccctatcagtcaccatttaataggtgaagacttctgggctcctattacaccgggaaacgggagccttgctttgaccagagcgggaggaccgactccggctgggataagaggatgagaacctctcaccatcattatttgatgggatatgtcgggctgcatgtcgcctgacacacgcgatggtgcgcctgacatcttgggtcccatcagtcattcgaccggtcacagaccggttgagtgcactgcacaccgcattaaatgcggcgtggcacgaccgctcgggacgccataaatgcgggtaggtgggcacttggaggcggacacctaacccatcgtacatggtgacctagagaggggggtcgggggagcccgacccctagtcacgggagggggcggccgccgcccgacctcgggcccgatcccccctcggggggagccacgtggagcccggggcggccttctccctctagtctcggccagggagtggccgctgccctacttcgggcctgactcccctcgggggagggccacgtggcatcggggggcagcctcctccgactaatctttggggaaggagtggccgccaccccacctcaggcctgactcccctcgggggagggccacgtggcaacggggggcagcctcctccctctaaacctgatacccccgggcccatatcaccgacagccgcttgttatagttccgtttgtttatggttaattcagaatctagatcaacatactccatccgtccaaaaataaataaatttaggattgaatgtgacatattccagtacaacgaatctagataaatgtatgtctagatttgttatactatgatgtgtccaatactaagttggttttttatggaacggagggagtatctaccaaacacaaatctactctctccttcccaaattgatcattatataactgcatggacacggatttcatcggaatacaattaatgcagtatgggagaatgtgtgcacgctagggtgtaattggcatggggttttaatcaatgcatgcattgtgagagaatgtgtgtatggtgttatgattaatgtgttttaaattatccttggtcttggtgcacaaacttatattattaccccctccaatttcattttaattgacgttttggacaatgacacggtctacaagatatatctttgaccttatttttctattataatatatataataaataaatgtatgtttacttttattatagtgctttaaaagacaaatctatatatattattctagttcatttaaactaaatacttttaaagttattgatggtcaaagttataaaagtttgacctcaaccttgtctaaaacgttaattaatatggaaccagagggagtatcaatttaggaaggatggagtataaattaaggatttgactggtcttttgtgtgtagttgtgtgccaaatatatgtcacgatggcgtcgctatttcgtttgctctagagcaggtacaatagcaggctataagtcagctacaaacatattttaaggagataaataaggagagagaagagctgtgggctacagatttgtagccagctatagcatggactccaggacacagtgtgtgtatgaaaagtgggaccatgtattaatagtgtagtatgtaactattgtatgaatgagctattagattggctatagatgaattagagctagtagttggctatactattaaacttgctcttagacgcattgatggtttaggtgcgtttgtttgaatataaaaaaataatcttctcatttttcatgcgcacgtattttaaacggttaaatggtacacctttttataaaagattatattaatgtgattttcaattttaatgtaattaatatttaattaattatgtagtaataatttatcttgttccatctccttaatcttctgttcctctcctctcaagtatagagtcagacggtcaaagtcagaacgatgtgagaagtccctatgctggttatgggttggtcaaactactctactgaacacaactacgcagcacatatatatatatatatatatatatatatatatatatatatatatatatacacacgtgtacgtatatatgcgtgctttgcaccacacacgaccatagcatataacggtataaaaagcgtgtttttcacgggtagttgaatcaataatatgattacttatttgtaacgtaacctattagtgatatcgtactacctccatcccctaatataagcatattcactatttttttataacgtttgaccactcatcttatttaaaaaatttatgcaaatataaaaaaacaaaaagttgtacttaaagtatttaagataataaagtaagtcacaaataaaataaataataatttcatttttttaataagacgagtggtcaaactgtgtaagtaaaatattaaaatcccttatattaggagacgtagtgattatataactattcctaacaataaatcattttagatacattactccctcctccagtgagttctataatttttacaatgatgcattctccaaaacatatctttgattatatttttcattataatatatataataaaaaatatttacaataacttataaaataattaatatgatcaattgattaacttttgacccacggtatttcatgtataagaaaaatgagagggaaatggttaagatggagaaaagggacagactcacagacatatgtagttcaggtgaagcttcgtctctcctgttggtaggcgaccatatgtagacacaaggagtcgataaatggcgttttgaccataaagttcagatggattcacgtaaaacgcaagagtcgtttgaccatcatatatacgaagaagaaaagctaaagtactatagcccctggctgcgaacctgaagctgcaacttgcaaatctgcatgtccgaggagagacaggagcaagcaagcttctacacttagctgtctttttccctggatggagtaggtctactcggcatctatacacatcatcacctataaaagttatgcccaagtaaacagcaaaaacggggacatctttggtacactgaggctagctgttgagttggcaagtttggatcttacagttgctccggtgacagtgtgagacacgggcacacactacagacgcacaagtggccatatacaacatgcatatatatgctgatgtcttagctagctgaacacagtcagttcaacagagctgtcacttttgactcgtagcagagacaggccagacatcatgcaccatccgaaaagttattagtccaggctagctagttttcccatgctgcacccagttgcaacttgctgatgcatggcttcatgcacggcgtgtatgtgttctatagtacatataactatggcactttgcacactgttgccatggcagtgtcgaattttagcttacaagtgacatgatagaaaagcaagaagcttacaagccatgtcccaactgcaaggtacttgtgggctcatggtcagtgcaagtcgacattaaactacggcaacgagagattgcgatcgatcggagcactcactcatgcgttgttgggttttgttgcaagattcgtcaaagggaacctcggatataggcgccacgagccaatggccagcctccagtctaagcatgaaaaactaatgcaatttgcagggttgtatatggttattatttcctctgttttttgacttaagatccattggattctttcacacattatctagctcatgcacgtatatcattgagcatggctaccatgcggacattatatatctttatccggagcaatgctcacagacgagcgatgacacttcagaaattcagaaaaacttcagataacgcggttgtacacgcatcggttagcagagcataacatggacagactacagagtatgcagcagaatgcagagtcgtagcaacagacacggtttgatggataagccatcgatccttgtggttaaacttctccaagttgtcaaaatgacaagttggctttgcactggcacgtttcgacctggagaacctttggcatcttctgaacctcgtttatggagtacttggactcttggaggcgacgccctgtgtacgaagctaagatcgtcacctttctggagtagtgtactactgagtgcggttgtgcgaaggttgcgagattgcatgttcctggaggaattgacttagacacggatcacggttgggtttgccgagagattggtcaaatcaaacctcggatgcatgcgaataattaaccatgaaacagcgcaacttgcatgtctactgtagttgtataggggagtagtgcactggtagtatagttagcacattagttagtcacgatactttacgcaatttctaggatgttgagagaagatgaaagaaaaaaaaaggaaagatatgcgaagtgagtcgttagcacttgattaattaattatttattattttaaacttaaatattggataaatatgattttttaaaaaacaaaatttccatataattttttaaagaaaacacaccgtttagtatttcagaaaacgtgcgcattaaaaatgtttaataagagtcttcccagtcaatctgctaatctcgaacgctgagtgaattaaaattttacgtctcatattgaattttacgtatcagtgtacttttaaatattagcaaaatactcgtctcctgttatggaattaaaagaatcacatcgctcattgcaaagaagaaatctattttaaattttattgtttagttttagaattagttaaaaaaaatatattttagtaataaaaaattcaagcaggctcaattgatttgttattattgcacaatcgtttccctcctttgaagagccgcatcatcgattaatatcttagcgtaatagaagaaggcgctgtgtttttattttcgttttcttttaacttcagtagaacatttctcatattcacaaaccctggctatttctaattcaaatttcaaaccctgcacacctatttgaagaggagatgaataatgtggaaaagctagttggcgcgcgcgcgccgccaacgcgcatttttggcccacgcagcccgcgcgctctctctctctctccttttcttcgcttcgctgtttctttctctcttttttttctttttcgttggtacctttttttcgctgtttctttcttttttttttctttttcgttgtttctaccgtatcgtacataacgtaattagtttagattagttttttttactagtgattagtttactagtaatttttaaatctcgagttgaaaatttttaaacctcaagttgaaagttttcgaatatttcaaatctggatttgaaagttttcgaatctcgagttgaaagttttcaaatctcgagttaaaaatttttaaatctcaagttgaaagttttcaaaattttcaaatcttgacttgaaagttttcgaatctgatttgaaagttttcaaatcttgaattgaatttttcaaatccgagtggaaagtttttaaaatttgactttaaaatttaaatcttaaatcaaaagttttcaaatctgacttaaaaattttcaatctgttggtaaaaaaatctcccgaaattactcgttattagtagttaagcaggtgttaactaatagtactatagataattagggaggtgctcgctgctggcgcccacacgccagatagcagccccctgaataatgggcccacatgtcagaatttagggagttggtggtgttccaccaccagtgggctatcctgaatagattagctgggctgggatatcggcccaatgaaaaggtccattctatctgttcgataaggcccaattgacctgagaaaagcggcccggcaattgccatccggcatccctgcgtaattccggcgccggcgtgcatactgccgaaataactagaagacagaacatcaacttgccaaagccaaaaacaggttgattaccgcaggtaactataccaaggactgactgttgaaatcattagcaggcagcaggctgtgtagatcttggaacacttgtcactgctccatgctccaaacatgcagctgtgcaagcatttggactcttctccgaactttcaaaaggtgcgagagctagcttggggaaagtttcagatcagacttgtcaagagggggccgcctacactgtcaatgcgtctgtttcaaatcaattcatgtactcatgtaggagtaccttgcttctgggaccggttcttttctgaatctgttagcagacaatcgtcggtacggccacgagatctgttcttttctacctcagcaatttggaaccaaataattagtgtcacattttcttgtgatcaaacaaatgagacctttggaatgcaataacattcatccacggtgaaaacaggccgagcaaaatcttcgttttgctgtcaaaattgctgcagctatttcccccttttcatactcgcttggtgcaattctttcacgcatgaatccatggtaattggcaaaagcaagaacagatgctaaatgaatacccatgccgcgcatgccgctataactgcacaacgtataaactactcgtgcagcggacgaggaagcggacgaggaaggcgcgcgaggcgcgacgacgagccagccaacggacggtgtgatttgtgactagtgagcaagagtcgctgaagtcgccgctgataattgctaatcttgtggggtatgctcatatagaaaatataaggatctttatgaaaaagcacgtccatattacaaaaatcccccctcaatcggagccgctcaatcttaattggacggagtaggatcgctaccaacgatagccctaaatctgatggtgtctaaaacaaattaacaaataaactcaggaccttaatgaaaacgcaccaacgaaagccataaatctgatggtgtctaaaagaaattaccaaataaagtcaggaccttagtggaaacataccaaggatagccctaaatctgattgtgtctaaaagaaatctatctaataacctaatgctggctcttttgctagctttctatttgtccacgtggcgcctcttactttgaagaaaaatcataaatttaaaaaagcatctaacaatcatatgtgagaaaaaaatctagagaaaaatatcacatagagattccagagccttccaaaactatcttctcgttccaatcacacaaacttctactcatttgtcttctataaatatactatgcgtactcgatactactcctataacttataatctagagaaaaaaaaagtcacatatggattttagaggctgccaaaactctcttttcaatcacacgaacttctactcatttgacttctataaatataccacgcctactcgatactactcatataactctagaattatatagtaaactcaaaattattaagcaaaaaaacaaatataaaacaataaatttacattaattttccttctttacatataatatgcatactcgatactacttctataactctagaatataaattaaaaccaaaattattatgaaaaaaaatcaaaatattaaaaatttaatagtttgtttatgaaatcttcagttatggcataaggtgcatctagaatgacatcgtgcacccatttttacagcacgaaccattatcaacatgcgtactagaaaataaaacatttaaacaaatcattctaacttttttcgagtaaaaaatatggatatatgatagaaatagaaaaagaaaatataatacctagtctgccatcctatgatccggtttttcctaaactacaaactatacattctgtagcagaaaacgaatctcacaaactgttttttctcattatttcgccgcatgtggctcgtgcatgcgcatgattaacaaactcgtaacaacatgatctcaacaatctctcaccgcaggtggtttaacaaactcgttaacctcttagtgacgatctttctcaactggtgtgaaaatgagtgtccttatcacataaaactacccttcagcccttttaaaaagcaaaattataggaactccttatatattcctttaaaaatttgttaatgaaataaatataagcataacatcttactttatatttttctctttatatatttagaattattgtgttattatatgctaattaaactacaattttttttaaaaaaagatgtgcttcaaaatctcacaagaatccaataaatataacaatttatttcttttttcatatgtttttaaacctttactgaagagaagattatgcccctgaaacatttatcgattccttatatgcccctaatatatttttttatttacttatatacacattaattttgattttgatctctttcatatacttgtcgtcaattggtctgaccattaaataggtgtaaaatgccagttttacattggaacgtgtaaggaatatatgtagaggtttgtggaatactttgccgtcaattagtcattagttgaccatgtcagtttaactttgaatgtgtaaggaatatatgtagagatttgtggaatcttttgttgaaaatataattatttattatgtggccataatattcataagtttgtttcacgaggaagtattattttttgtcgttattaaaaatacttttccatgaataacaagtataataatgtcacaaatataaatatatagtcttatacactcccaacaatatgctcccttcattttttaatatattatatcgttaactttttaagagacgtttaatcatttgtcttattcaaatcatttactttattgtgacttgatttatcgtcaaatgttcttaaaatatgacttaatttttttatatttgtattaaaatttttgaataagataaaatatcaaatgtttataaaaaatagatggcatcatatattaaaaaacggaggtagtagtatacaaattttcatattactttcatgtctaaaaacaaatcaaacctttcaataataattaaacggtaagtaatgaaatgtgcatagaaaggatcaaaagtgatttaaatctcatagggtctaaaaggagaatatcaaatatgaaaaggactcatttggaaaacctccctccgctgcgcttgactactcaatcggaaccgcacatccgtgatcaaacgtctcattgataccccacacgtttcgtcggactcaccgtcgtcgttgcgctcgccgccgctggtcgatatacccgctgagtcgccgatatctccggcgcaaccgccgaggataccaaaacgtggcggtaacgctgatccatcgctccgtgccccgcctctcccgacttcccacagtggttcgggccgccggccgccttcccctaagccctagccacctgacgcacggcacggccgctgcgagcctgcgacgactgattttccttatatgcgggtattactttgcgcggaattcaattgtcagtggtccaaccaaacgacaggtacagcaagaagcctcctccgctcgccgtggttcagtggttagcaggggagaataattgaatacattcttcggagcctgttcaggtacgtaacctatctttctccactaacagcagcctacattattgtgagatttaagtaattagtactagcatgttgggcttgctgcgtcggccatcaatgcttgcaaatttatccttctgttgtcatttttgggtatccttatagctgtatttgcttgacaaattcctgtttcttggttaaaacgagtgtcgggaacgttttacacattggtacattttgttgctttacattcagtaactagtttatattctttcctgcattcagcacaaccatcttccattgactcagattcataatccagcgtattcactagtactattcagcatctaataacagaacatgtcaatcctatgcaaagcgacaacagtaacttctatttaccactcggcacgatttcgcgatcaagttaaaatctttgtaatatccaccccttcccatattctgccctgtattacacctaccaggcagtacaaatcttctatagtgctacagtccaaaagaacataaaaaaaccttaactgaagaaacgagctagaaatggcgacccgattacgggaacttctcaacaatgttgttgctgctggcttgcagtaattcaattcttcacactactgctgctattggtcttgctccttggctgtccagtacgtcttgacgaccaggaggatcttctcccggacgagcgggccatcttcatggtcgacgatctggctgtcccacctcatcccgtccgcggcgctcttcaccttcaccagcatgtccacgtcgtctctgatgatcaccgtgccctcgggcctcaggatcctgtccatctccagcaggatgatatccatctcgcacctgttacaaaaagcagtttgaaaattgccagctatcctcggtttgtcccgaactgaatgtgatgcaaacttttacgtgcattacctgttcttgtacaaggtgaagaccgagtccgcatggatgagatcgtacgtccgtggataagtggacatgccctcgcacctgcacgcagtgaatgcagatagagatgagaaggcgttgagcaacagccatcagccatggcaggcaccgacacccccgcgctgcaatcagtgagacagcaggggccatacccaccatgcatgtgggcgagagcgtacatggccatgacagtacagagcagagtactactacgtactaaccagtcctggtagcttccaatgagcccacgctcgtagaccaccccaagcgtggaggagttaccaacggtagggaccatgttcatgacccacaaggggtcgctggccaatgccgcggcgaaaccgccgaggccggcgttcatgtcgagcacattgcggtatcgtcctttctgctcgaactgattgatcacccccttgtagtgctgaatccgcttcctccacagctcggtgtcctgcacaaacgctttcgatgtcacgcccttgatgctacctctagatatcctgggcggcacggcggtgagccgctgcggccatttcttcagcgcgccaccagcgacctcgctggcgtctgagacctccgggagcggcgtcacgcaggcctccatcttgtcatacctaagtataaatcaatgttatagcaacgcgcgcaaccaacactagtgaaataattcgatgcggttctctgtgattaccatgccgcgtcggggtttttgtgggagcagaaaggcggggacttgcgggaggccttgcagctggcgtggttggcaggcttctgccagacagcgatgtcgccagcctccttgatcttcttccagcagaggctcctggcgacggcttcgatagcctgctgctcggcgttcaggtcctccttggtcctctcccaccctttccagtacttcttccagttgatcggcggcccggacaggatccagtaccctcccggccgcagaacacggtcaacctcgatcagatacaacccatctgcacattgacatgttcggtagtgaccaatgagagtgtattcggatgaagagatcatgagtgtgtatggtgatcgggcaatatgggatacactaccgtagaggtgccaggggatgaggcagcgggagcagtgcgccatgtcgaaggcgcgggccgggtaggtgaggcggttggaggcgagcacgccgatcatggccggcacgccgcgctccagcgcgaactgcacctgcgcctcgtgggagtcccgcggcgcgaaggacatggccaggatgtcgcgggacagcagatacgcgccccagctcgccacctgcaagggaccggcgcgccggacgccgacgcattagcacgttacatcagacagtcagcaggtcgacacttgtgcatgcatctacgagtactgaaatttcaccttaacggctgtgtttagattggcccaaagttttggaatttggttgaaattgaagacgatgtgactgaaaagttgtgtgtgtatgaaagatttgatgtgatggaaagttgaaagtttggaaaaaaaaaaactttggaactaatttgctagtgaagccagtaggtttcagtttacgcaagtgcaactagacaggcgctcttagaaatgcaatgcgaatatgataaagcatgtatgcaaatagtaagcggttcttaacattactgcaaaagagaaaaggaaaatcactatgcatccgttgaaaatcaggtgatggaatttttatcaagaaactttgtagcaccgactgacagtgaaaaaggacagccagctttcccattccatccatagtgtctggattgagcaaaactttttaccagcggagtttgttagcaggctgtcaggcacgagtactacccttcgtggcacaatcatgcgagcgaaaaaatcccaatcgaacaagatgccgaaccgtatcggagattcagagatgtttgtcaatacagacatacttaattgggaaaaaaggcatgattctgtcgctcgcaaaaaagaacaatatataatgcggtcttccagacctctttgacctccctgttgaccatgggatctctcccccattccccaatttgcactcttccaactaagatttaagcaagatttttcgcaaggagcaatgtgaaatgccagcgtcaatcgatttgctgtaagtaacgaagaggaagaaagctcatttgagcacttaccccgcagccggtgtcgagcgcggtgcggacggagccgtcgtggagcgggatgagcttcccaatgtcgtcgatgtacgcgtcggcgccgtgggggaacatggtcccgccgcctgggaacctgaacttgtcgccgtcgacgcgaatccagttctgcaccgccttctcgacggtgagctccttgtgcggcacattggcgaaccacgcgacgtcgcggctggcgggccacgggaacgggttgcggtacccggaaggcgccggcacgaggcagcgcagccgctcccgccccgtggggcagtgccgctcccggtacaccagccgctcccgcgggtaccgcagcgaccgcttcacgtcctcgcacggggtgtactccgagtacctggccgggcacgcctggtacctccgcgtcgccgccgaatccccggacgagctgagcacggcgccgtccgcggccgccgcgtggtgcgccgagaagtcgagcgcctgcccctgccccgcgggcgtccgcttccgcggccgcgtggcggagcgggtggtggcggtggtggtggtggtgcaggcgacagcggtggcgacggagacggaggatggggaggcggagggggaggagaagccaccgtgctgccacgcgccgaggaagtaggacgcggagcagaggagcgccacggtggcgatgggcaggaaggaggaggggcgccgcgcggcggcgggggagatgttcagcttggtggccgccgggcggacccccatgccgacagacagcctcagctccgcttcagctccccggagcgtgtgctgtctatggcgcgggccgtgcagtcgtgcactgcgctctgtggtgtggggttttaggtggcgaggcgggggggacacactgtcacgctgcccacaccacaccggttgtgtgaattgatgtgtttgattttttggtcatcaacggtggaccgaccgtgcttacgttgaactgctttgggatttgcgcatagggaacttagggaaggtcattacgttggggaaaattacttgacggtttgactactcctagagtccttgtgcttagcgtggctgcgtggtgtggtgggagtattccgagtacttgtgttttttagcttttggcagcgccggaatactagtatagcttcttgttactagattgagcttttctttactgcagacatgttaagcccgtgaagcactggatctcaatgctcatgtgattccctgcaagtttgagaaccttttgtgaatcggcatttgtctctactctctagtatcctagccaaggaggtacgcatcagttgtagaagggcgacgccagcatggaaacattcgctgatatgaggtagtagtatagtagcaaaattacgggacctcgtgctaatctctctctgttagtagtacttacgaatctagcgattatagtatatattttttcagagggatcttccggttttatccaccgttggaaacacagtacacgactgcacgaggggtcgggccgctcggcgcgcacatgggttgagcacttgggctggttcgcgaggagcatccaccaggtcaccaccaccttcaaccacagcaggcagaacagtatatatgcgtacactgtgtgctgcgccgtgcagccttcagtgaagcagcgcatctacgcatctgcaggcttggatctgaaactctttcttgggtcaggaacaattcaaagctactctgagtaggcagtaaccccacagtaatcattgagtccgatgcacacatgcagacaggcatggctggggccgagatacaagcagcggccggcagtgcccggagataagcgagaaagctgggagcggacgaccccgagcatgtgtcgctgctaccgatcgatcaacgaggtctcacggccatcgccgccagattcagattggcgttgtaccagagcaggcacgggtcatgtctggccccgtttggactttggagtaaaaaggatggagtcgttgtctgactatctatggtcttgtcgacgctaccgattagtttgggcacaccgtcgtgcatgcttcgagtggaagaccatgcttggcctgtaccggccgtgactgtcccaagctaacaagcttaggagatgggaatggagatcgtgccgccgtgcgagacccgtggattccgtggaacggtgccgccgccgtgccagcgcaatactttaccgtggaggcgaggattgcatcgaagtgagccattcgatgcggctaaacgaacatcgaacggttgctcacttttcccctggggaaaaggaaaaaagtttggagcaccgagatgcctgcggaatttttttcatttttaaatttttttcaattaatatttacagaaataatccatcggcgcaaaaaattacaaaaatagacgctgccaccctccactagggcgacaagctgacgtggcaaacgggggagggacgaacggtgacggcagacgggagagggagggttttttttgcacgaaaacccttgccgggctcccatgcaaaaaaaaagccaacccgggcctaatactttttggctagtactttttgcatatgggtcccttgccgccctctagggcccagatgcaaaaggtaccatccaaatactttttagggctgcgaaaattgcatttagccccttgccgcaaggggctaaatgcaattttcgcagatggcggcagatgccgccgtcgagccgctgtctgccacgtcagtttgccgccctccactagggtggcagggtttattttcgtaattttttacaccaatagattatttctgtaaatattaaaagaaaaaaatttaaaaatgaaaaaaattcgatgcctgcgagacaggagtcacgggccttcgcatagcacagcggcacagctcaccggagaatttcggcccagaactccagaagttaatgcgcagcacgcacacgcgcaggccaccgaatgcagcgcggtcgaatggaaaaggtccaatttacgctagctcagtagttttattcatgtccctcaactataaatcgaatatagaattatagagcgtctgtttttttaagagaagtgtacatttttacccagcttctacatttcagcaatttaaattgagaacttagcccctaaataaccaaatctgaaattcgctcttatggagatatagactcaaaaccttaagggtgaaacttaggtcactccaaccactagattacatgtcctttcgcatataaagcgtctagtaacttttaagaatcaatacaattaagttcatcactagcattgatgacagctttgactcttgtgttgccttgacttaggttttcctctcatatggacatgtggcacctacgtgacactagaagaaaaaaaaatagaaacaccaagagatccacatgtcaatgatcatctaattagaaaaaaaaaactaaaataaatatgttgggacccaacataaaatcttcttcattaccccttctctcccatcctcagttgtcatcactcgtcactcatcaaccctagacacaacgtgctccaagcgaggaggcaagcggcagtaggcaggagcttggtgtggccagtcagtaggaggtccttgagtcgatgcgcccttcactagacccaacccgccatggcatgggcgttgcctccttcttacatggttgacatcaattgagatcccctgtagtactgcatgtgtagtactgcagacaacctgcatccatattcttcaatctttctctctccaccacaagttcaaggacgtatctagggaggagacacatgtctagggtggcattggattttgagtttgtttattcaaaatgtgaaagttttgacttttctaatagacatttttttgcctcttgggtttaatacattctcttttacattttttcgcatgcagatacatattacgtatggatatacctattagttttttttaaaaaaaaatctcgggtacacattcgaataccttaaaatctagataggcctgcccctaccacacgtcggccacaaacaacaacggggacaaggcagagaatcagagatactcagtcgcctcaatacctccatcgccaccacgtggctcttcttgtcaaccttggcgcgaattgagagcttgacaatggtgaggtaggtgaccctggactcgacaaggttgacgcgactcgacggtcccgattccgggaacctccaccgctatagagagctcttgggttcgccgaggtgggctgatacctgtttttgcggtttaggacgcagatgaaacttgacacatatctgagggaccaaaattggacttcttccctgctgaatacaccagttcggtgatgggcctcggataactcacgttcccaggccgactgatgtcatagcccacacgaacttgggcacattttctccacgaggtccaaggtccaataggaccctccgccctccgccagcgaggcggcggccatggaaagcccaagaaaaataccgcgatctcgccgagcagcagccgcactcgcgcaccaagaacacggcgccaacttgtcccccgtttcagactttcagccgttcgcctcaccgatcgagccggtgcaccgtgaatgacgctaccagatcgccgctgggcgatggcatgataggccgccgatgatggaccatgcaaagcatgcagcacgtggtatattactgtattgatgaagcaggtgcctagctaagcttcaggtccacactcgatcgtcctgcctgccgatcgacgaccacatcttcctgcgtgcctgacctagaactgaaacgtaacagaagactcaatttagtattcgcatatgtggtttggcatgcatgcagcgtgctcacctcacctctgacatccagacgaagtaatggctccgtttcatgagttggaagcatgacagcttttagctggagtttcgtcacgaggaagctcgaatcgatggacagatgtgctaaggaatggggagaggagagccaattttgccctgagctaatgaccaagacagggagctctaataaaagagtcgaatcatgtcaaaatgggtggcggtgttactgttagttgtcaattcgctgatgtgcacagaacagagacacctaatttccacgtatataattaaacttggatttggagcaacacgtgaacgcatggtgatttaaataatgccatttaggctgtcgatctttgaataggccaaatgcacgtaggtacgaataacagcttagaaatttagcagcttggctaaacatataaacttcttttccggggaaatattttatcaattgctagctcgaaacattgttgcataagagacctcagcgtgcagtcaatattgttgctgagcaacgctggccaaattcttaaagaggagaaaaaaaaaaaggaagagaaatgttaccatcttaacaatgacgttgtcgagttttaggccctcgatgacgggaaaaagtatcacgacaaacaaatagcctggccttttaccagaaacaaccgagcagattgatagatagatattccctccgtctcataatgtaggattttaagtttttgcttataatgtttgagcacttgtcttattaaaaaaattgtgcaaatataaaaaataaaaagttgtgtttaaagtacttcggataataaagtaagtcataaagaaaataaataataattctaaaatttcttgaataagacgaatgattaaacagtacgagaaaaaacttaaaacccttatattataggacagatggagtacatggttaaatctcctgtgttgcgacaaggtatcccaatgaagttaggaacctcagctaaccaagaatctggcataacatgttggcacaattcatgattttttttttgcgtagcacgtggttgaatattttacccatccatttgacatttaatgtgttcagttctagaacttcgcctgtcgattatttgatccgtcagacacatctagagcaggaaagggattcaaatatgaagtctaaacgagaaaatgattaacatgtaattaattgatctttaattattacaactagcatgatgacccacgcagattgcgcggctagcatcattatattttctctcatataatagcatatatgttttcttattatattattcaaacaacataattttaaattttgcaataactttacaaaactactaatgtgtaatattcatattatattttatatacgtgttatttattaattatttttaatatcacattttagttatttgtaaattatgtatattcctatatggactctagactcgtcttttaatatttcttttttttaattctgaattttctgtaaattatatttctatatagactctatactcttcttccaatattatttatttttatttctgaatttttgttatttctaattgtattcctatgtggactctaaactcatctttcaatattctttattttttaatttcgaattccagttacttctaaattgtatttctataatgacttaaactcttcttcccatgtttttcttaatttcgaatgttagttattcgtaaattgtattttttatacggactcaaaactctacttttaattttattatgtttattccaaattttagttagtttaaattcctatatagactctattctctacttctaatatttctttttttttaatttcgaatttttttttcttaattgtatttctatatggactctatactctacttctaatattcatcatttttaattccgaatttcagttatttcctaattgtatttctatttggactctatactccacttctaatatttcttattgttaattccgaatttcagttatttcctaattgtatttctatatggactctagtctcctcttctaatatttcttttttttaattctgaatttcaactatttctaaattatatttctatatggactctagtctcctcttctaatattccttatttttttaattccaaatttcggctatttctaaattgtatttctatatggactctgctttttctttttctccgattaatgtgaaaatttctaggcaatgagagcgaacgtgcaggctgctttttctattcctttaataatataatagattttttaaaaagaaatctatttaattttaaaagcaaattctatataacaatttttcgtacaaaacatatcatttaattagcagtttgaaaagtgtggtaatgaaaattgtgaaagtagccaagtcgatccctactttagaacatgccctaagttctaatctgctactggagctttttatttttctagtttatcgtaacaatgtttttcaaactgttaaataatatatacttttacaaactttctatattaaagtttctttaataaatatataaatttatttttaagtctataataattaatacttaattaatcatatcctaactcaccttgctttacgtgcaacagaaaatctcctgtctaccacaccttcaaacggaaccaaacacatctgctcaatagccactctcagggctcctttcgaacagaattttggagtaattttgaaggattagatttatatgtggtcctttggaatgaaagaatatctctcatagatttctttgatattcattaggattgactcaaatcataggaaatttggaagattttcaatgtaaggttcaacctcttacatttttttttctgattcccgtgttttttctacgggacatctaattatttttttctatccatatgatacaactatacgttttgttttatccttatgttttaaaaatcatgcgttttaaatgagtactcaacagagaaaagggattgacttatgaaaatagagagaaaagggattgacttatgaagtatgaacacttgaaacaaacgtcgcaagcaaaagtttttctggctgttggatacttgaatttgcagcatagtttggtatagcccctccgtttccgttccatctcaagaataaaatattggagcatggcagaacgtgtttgataatatagtgctcattttgttttgttgcaatatctatctcgttctcacatgcccatttaaatgttagttagctgtggtccaaacgactattggatgagatcgttatcttgactccagggacagttttgttgcatttataaatatgtccctatggaaagcttactcctgtcctttgtccattttaatgtagaaaactagaactttttttataggatttgcatgtataagagttggctataaatcgaccataaacttatgtgaaagaaagaaaaaaaaaataagtaaccacataaactactcaaagacaatcttaccaccgaagatcacttttccaactcacttgttttgtttccgcatgcatgtttttcaaactattaagcaatacaatttttattaaaagatttctatataaaagttgatttaaaaatcatattaatccaatttaaattattttaagctaatatttaattaattatgcattaataaaccaacacgttttccgtgcagggagccccagtactcacttaaaaaaggccccttctttatggaacaatatttttctaacatgcaaaataatttacaaaatttcatgcaacaaacttttagcttataaaaaaaattacaaaactatatgaaaacattcaaactttgattaaaaaaaacaaagtaaaactgtacatataataacaaaatggcagtgaaaacgtactaaagcatttacaaattttcatgcgtctaaaattaaggaaatccctaataaatgtaatggtattttctgtatgtttctctaaatttcctagatcatcctgcttgaaatacataaattttgctgataaagaaattggaggtggcaactgacacagcgacaggcatcttgcctatctctaaaaaaacagccatctcgtacacgaattgagagttatccctgggtttcgtcatcattgttcatttcttttttttctttttttgaaataattgttccattcttatatcatgccaactcgccaagaaaaccaattcaaccgtacatccagaaatcacgtacagaccgtgtgttcataacttcataccccgctggtctttcaccttgacgtcgatacgctttcatcgtggtgtcgaaaacgtcgccgtctcacacgcgagtgagctccgaggccgggcttgtcggttcctgccagggcaaacccacccgcgcgcctctcgcgtcgacgtccccgaccgagctctcgtgccgcaccgagagcttccccctcgccgttcatacgctcccgggtcccggctgcagggagaagaggacagggaaagagcttgcgggcctccctcccgccgtcgtacgtccggtgcgcgtcacggtcagccgagcagcaccatgcaatcggccagtgggcgacgttcctccacgtccaagccggctcgcgcatcgtcctgcaccgtccgtccgtcggttaaatgcgccgaatggtcctcaaccttcttcggctgtgttttgttcaacgtaaaatttagattttagttaaaattgaaaatgatgaggctgaaaagttgtatgtgtatgacgggttaatatgatgaaaaagaactgaaatttcttcctcgtgttactgggcttaaattggtagtactacctcaggcggtccaaattattaattgtccccatcagatcgagtttttcttttggctggttttcaggttcaacactgtacagcatggtggcatgctgactcggcctagagctttcttcttgcttgcacacaatgaaagacccaaattgcccattcctcgaatattgtactccctacgtcttaatataaatacaaccaaatccagatataacgtactgttcagattcgtaattctaaaatatgtcacatctatatttgtttgttacacttatattgaaacgggggattaccttgaatagcggtcggaaccaccgggtaaattgtcggtttcccccaatgatttgtattttatgggtacgtaaacggaagtggagatatgtggaaatttttatctagctagacaggtccagtggtagttataaatattttttttcaattatagaaggcacgtaggtacacaccactacccataaccataaagtatgccccctaacatgaggtgtatttgctcaagtttttttacaactcacgcttaactcggtcttgtctccatgcacaacttatgctgcgttctatacccatggttctcaactttactctctcgttttccacgcgcacacttttcaaactgctaaacggtgcgttttttgtaaaaaaaattttataagaaagttgctaaaaaatcatattaatccatttttagaaaaaaacaaatacttaattaatcacgcgctaatcgctgctccgttttccatgccatggagcgagggttcactcccaaacacagccttagtacaagtgtacaacatcaaagtcaccatgctgcgtacgatgcgatggcaggtggtactacgctgctccattggacgttttagtagctacggggaccaacgtgacaaccgcatgaaaggccagggagcatatacagtgtgcatggacgtattcttccccgcacggccggcgcaacaaaccacgtttcccggattcaggtgcggtacagcctgggctgagaaaatgcagggcccatcgtgcccgtctcgtcgcgcacgcgtatccgctttcggctactcctctggtcatctcatcccggcaggggcggcgcattgcatttctagctactcgctgtgtggcttcagtgtgcaacgtccgggccgttgatatggttagctgcaccacagcatcactagcgatgccgtggcacacaacgccgtttccggtgaaacacgtggagcggttgatctcgactagcattgagtagtaccgttcgatgttgtgccagaaaaatgcggtcacataatgttcggcttacgtggtgcatcagaatttttggacgtacagctaatgcaaacatgtatgccactcaaaaatatttttctatatttagtttacatttatgtgtgggatattggtataaaaaatgttcattatatgatctggcagacataaaagcttacaggtttacaacaaaatttatagtgctatgtgtgttgtgagcgtccgtccgtgtttgtgatatgtttctgaaaaaaaattcattaatgtggataaaactgattcaaatggaccattattagtggcgcaacggaaaagttattttttctaatatatacagtctggtcctgggtgtcacttaggtggattatcttgtaaattatattcatagtttaggtccaaagcatgcatgtttgattggtcttaagcaccaatgtaaccagggccggccctgacgggtggcgagcagtgcaaccgctctgggccgcccccgatcgtagggccccccacccgcaccacatggcccctgcgatggccaaacaggaggcagcagagccacagtagtagcgtcgtagcgatttctatgcctaacagtcaacgttcctaattcctacgcgtacgcaagtcacgagattaacgccgcccgccgcgcacgatcgccagtcgttcatccgatcatccagtcctatccgttccccacccatgcgttgatcaattcaccggtatcgcatcggcgcatccgcgcgcctgccgccttgccgagttgccgtcggctgccgccaccagcagcgaccgcacgagcccataggccatatctgcaagtccgcaactactattgctgaactgctttgaagcctgatgatcaagaggaggtgagcagcgggctgcaaggagcagcaacaccaccacattgacatcgctgtctggtttattgaattttcaatttctattccgttgccatctgcaccttgcgcgctatgcttggtttatgtctctggttaattgttttggtagagtctagagatttggacttggagttggacgaagttgcggtagtgtgtctgttgccgactcactttatgcgtgcacctggccgtacatgatcaataaattggtaagattttaaattttgatttataacataatttatatgagttaaaccagtaaaccactattaataatatttttttcaattatctcaagccatttcatagagaaaaaagtattggatgaaattaatgtcaatatcatataccaatgacttcagaatggtgtatgaagaaaaatttgaaggtaacatacatgatgtttttcatatatattatttctaaatacaatttaattttttatcgataaaacccgtgtatatacctatttattgatcattatttagatggtatattaagggcccctatgttttgtttcgccctaggcccatacaaactcaggaccggccctggatgtagctggtcacgttggccgaaactttgtgtctgctcacactgtttcctgtgtgcacatctaaacatctattgtgctcccctcctcctataccgcattccgcatgaactccggctatcccgcatagtcaatagggagggcggcaattaggacaccactggcaatcattagcaagctgatgtgttttgggcaacgatttggatggcacacgatagacggtgtggtgcaatgccatcgtctgtgtgaaggcggatgatggacctcaactttgatgtgggtggcacgtgatatgcaccttttttttttgccacaatgggggtggcgcctaatatgcaattttttttttaccacggtagcttttggagggtgccgaatgcaaaatattgtccagcgtgaactactatatctgtgtccaggaccaacaaaaggtgatttggatttagttgcgatgcattgaatcataagtacacatttaaatatgtgacttacaatatcatagagctaagtgacacttcgatcaaagtttaaaaaccagccatgtatttccttctcttttctttttccttttttcttcggttcattctatttgggagcacctcacgttagacattggtgcatgatttaagacgatgcgtgtgtggtggccagcattttacccggagaaaaaaaaatctgcatattggcatatttcttgccactcgacgtcgttgctacaagctagtctacacacacaacatcagcaacagttacggagtatgtaattatggaatcgctttcaagttctcgtgctcctgctcaaataatcaatgcatggtgctacagtccatgcatatgcgtgcatcgaaatttcttcatctccctatttgctgatgttgaaatactagaaaagacacatcggttgctgttgtactgtcgtgtaacatgccaacatttgaaccacatactcagcaaactaaacctgccctcccgggaaacaagtggaagcaagggtttctaggctttgcttagccctaattgatgcagcaaacacgttctcaccgaacaattggtcggtttggacctgctctggtcgctgattaaatttgttggaccattaattcctgacgtttttcacgctcaccctttatgggatttactaaccaactgaagcttcgaatttagtatcgttcgatcctttccaagatccgtgcgttggtctcgattcacagtactcgtgcgtgtgcaacaaatatctcttgcttaaagtatgacctagcacatggcaaaatcatagatgaggaactactcaacggctcaaagtgctaccatgcatccttattttccactaccaccttttctatgttttactccctcggtcccacagattttagccattggttggtagattagtggtaaagataaaatattaaattttttatcatcgataaaaaatagttttttgaaagttgtagataagagctattgaagtataagatttcataatttgtaatgaattcaatgtaaacaatggttgtgaaaaattctaagaaaaataacaatgtataatatagtaacatcgatcattccaaaaaatgtaagcttaaattcgacctacatattaataaaacgagacaaattcgggtatgtatgaattgtccattcgctgaatttatattttttatatcataatgcatgagttaacattggaggaatggtatatacataagttgtatgagtgtaacaaagccatcgtttcgcttattcgtggaataagagaaacggcatatttacaaacgaaaagtaatttgtgaataaaacctttatatacgtgtttttagtgatctaaaagaaaaggctaaaaaataaacttcgatgaaaaaaactcaaaatcagctccaaatttaagattgaaaatttaaattttggttgataagtataagcataagaaaaagatgaggccgcaaattttataaagaatgttttgtaattatttagatggtttttaaataaataagagatatctcttatgtattgtttggttaatcccatccaagaaaaaattaagagaatttattttacatctattatgatgcgaaattattttcttctcaatcttctccaagtctcgagagttattcataaattgtagacggagatataaatgaacttctttttaaacaattttgaggtctagaaatgattttttatgaggaaatagtattaaagccagacggttaaacccaaatgaccgtgttaatttattgtacggtaggtcatcgacctgccaaatggtcatagaggcgtttccgcgtgtatatatatagcaggatgaagaggaagaggaagaggaaggcagagaagaggaacgagtcgtcttctccaaggcgtccgaaaaatctctccgttctctcgcaagccacagtacttcctactcctcctattcatgcccccggccccgaattggatacgctggttatttcagaacaaaagtcagtttagattcgactggaggcctaactggtggtaatttgaagcattttggttcgctttggggggccagtagaggcaaaaggtctgattttttttatcgaattggtcgcccttttgattggagaatcgtcaagctcggcgtgagagtttctttggcctgtgctcgcctgagagtagaaggctgtggttcttgctcggcaaaatttgggcttatccttaaatcggaaggcgtgggcagctaaattcacaaggaaagcttcagttacccacggaagaaggatttcccttctctctcagagactcggattggtgatggcccggcgctgaattgctctgaaatctgccgaaagcatcgatctttgtctccgaaagatcagggattgggccctcgtatccccaattcgccccacctccaagacggcggtcgggcttgtagatggggtcggggtcgagcatcctcggtgcggacggggaatggggggtgacgtcccttggagacatgccggagagctgcgtggcggcggtgctgctctaccttgatccgccggagatctgccaagtcgcccgcctcaaccgcgccttccgcggcgctgcctccgcagactgcgtctgggccgggaagctgcccgtcaactaccggtacctcctagcctttgcagctgccgctgatgacgaaggtggtgacggcggacacggtaatggcaagcgcagctcgcccagcagcaagaaggatattttcgcgcgcctatgtcgaccgactccattcgattttggcaacaaggtaatagagccaatttgttctttaatttctactaattaagattcaggtaatagagccaatttgttctttaatttctactaattaagattctatgctggtttattagagccgatttgctaatgtgtcatttatgtatgatgattaatttcttcaatgagggttgctctaaaaaaactgttcaacggggattggagttgttggggtttggggaatggaagacataatttgaccattacttgtttaggtttggtggattaatatatatatatatttggccttctgtttgcttgaaatgatctgtcatgagtaaagaacatccatcttgtggtttataggaattctggattgacaagaacaagggaggtatttgcttgtctatctcctcaaaggcaatggtgattacaggtatagatgaccggagatactggagccaacttgccacagaggaatcaaggtatttaccccttggtggctttgattttgcataactatcgtcttgtaggcgaataataaataattgttgaagaaaatatttgacctctgaaaatctgagttgaattaagagttatttggttatttggttttacttctcttcctgatgagttaaaatacatcaattgattgatttgcaaccaccccactaatacactattgtactaaccgtacaaccttgaaattttgttagcttgtttctgggtattagcatatctagtaagtgaaacatgcaggagtggttaattcgggcagcaatgttttggtgcagatgagaataattttctttgacctgaattctatgaaatttataagattacttaaacccattgaacttcttagttgggatatatgagttcagttgtattagagaaattctctccacttaacaggaaaaaaaaatcaagatttagtagcacatttccaaggttaatttacaagcccataatagttactttcggatttgtgcatcagtagagcacagaaacattctgttactgttctgtcatttgagatagaatgtatcttgaaacaatttgttatggttcgttcggtgtatgattcaaatgaataaattctggatcgaaaaaatagtatatatgtttaccttaaagcttgctttatttttttttaattgtggttacatgttttctacactatctaaccgttctatacatttttctcaacgtgcccatgttgccaaggactaccaactattccactaagagctctctaattttctttcatgttgtcagtcacactgacttaagcaatttgagatttaacttgtggaacgcctgattaaaagatttgctgtaatctggttagttccctagtgctttcagttctcactgctatttgcaagtactgcataaatttagaacatttcattatgtgatcacttctattgttgatagagacttttatcttggtaaattggagatgatttaggtccttattcgtatcatgcagattccaccatattgcctatcttcagcaaatttggtggcttgaggtagatggagagcttgatttttgcttccctgctggttcatacagcattttttttcggcttcatcttggacgaccatacaggcgcatgggccgccgtatttgtggaactgaacaagtccatgggtgggaagccaaacccacacggtttcagctctcaacttcagatgaacaacatgctacatcagaatattatctagaacaagaaggaagctggatactttatcatgttggtgattttgttgtactgaactcggacgagcttatgaagctcaagttctcaatgttgcagattgattgcacccatacgaaaggtggcttgtgcgttgattcagttttgatatatccaaaagggtatcggcatgaaaaggcaaatatagtgcacatgtagtgctgcagaatggttgcaatactccagcaacatgagacaattcagtggggtgtggctagctttttcctgtccgttctttcctgaaagtccatgtgtatatttttttccccttgagttttacatgatgtaaggccttttgtattcttttatagtgttagggtagggaagtaaagggcgagttttttttttaaaaaaaagaacttaaattggcatgataattgttgagtacagagtcctagtcgtttaaaagtagggacagatgccatcttcatatgtaatttttcatcagtgcaatgatgtttggcgatctggatattcctctttgcttattcccatggcttaaagctgattttatcttctcaactgtttgggtattcaacagctttcaggtgagcaaatggatggcagtaataaacttccagcatactagacctgtcgcccgcatatttttgcatagagcttaagctaattattctttcggttaatgataactgccttgtatattgctgccctagttctgaagattttgctgatcacaggatgccaggatgcatgtattctgcacgctgcatatcgtaggaattgctgtaacatttttatcgcatatgatcagatccaaaatccattggacttgggtcaacagacaaaatactgggtcctggaagtgttgtgaatctcaactgaattcctcattgttatctaatccttctgcaacggggcaagggtcaacgattgttttgggaacccatctcttgtatctgaactgttccagataatgcatcgtactgtattctatttagagattcaactgggcattcaaatactccgtcgagaaaggaagacgaagagattgttaacatggacagcatgatcgttaacaagtcaatcgaagtcccatagagaggagcgcaggcgcggcgcattgccgcggcgaagtcagcgatgagaaaattggtggaggatccataactgggttaagtactcaagtgcacagggcgaagccgtgaagggccggaatttattggtgtgcgagaagcccaggagaccccgggcttttgttctgcagtggaataagtccactgaccatcccttaacttcacagcaagtccgtatggcatatcccgcatccctaatccctaagaccctaacaccataaatcttgaccccttaagtcttcaaaaccatacaaaatagatccccaggcagtatagaccatatttcccactactttcgctgacatggcatatggcagggcccacttgtcagtgtgccgttgacgctgttactagacaaatcgacagcaaaattcggttttcggcgagcagaaggctgtagacgctggcggacaactggctctccagtgagttaccgaagtcgttcggccgcctcaccgagctcagcatcgtcaccttgtacaacaactcactggagggccctctgccaaaattgttgttcaagctcaagctagaacccgatggtgatcaatttctcccacaactgattcactggcgctgttgtgctgctcctcggctcgagctccctctccgtgctagctctgaccaacaacagattctccgatgtcatcccggtggtgcttgcgtggtcaaggtgcatggtccggctccagctgtccggcaaaaggctcgccggcacgatccctgccgagctgggcaagcagactgagctcaagatacttgaactcaacaacttctctggcgacattccgtcagagctctccaactactcgcggctcacccatctgaaccttgacggaacagcctaaccgacgccgtccctccgtggctcgatgacctttggttgctcggcgacctggacctctcctcgaacgtgctcaccggcggcattccagtggagcttagcgattgctctggcctgctcaagctgtccataagcggctttgggatcaggagcatcctgccggagatcgcaaagctggcatctctcaacattctgaacctgcagaagaatggcttcaccggcgttataccatcggagctccagcgctgcaacaggctgtacgagttgcggctgttggagaactcgctggaggggccaatcccgccagagctggggtagttgccgcttgccggagctgcaggtggtactggacctccctcgggatctctgtgttgagctcggcgaggcggccgaatgactccggcaactcgctagagaggcggttgtgcaacctccagcagtgcagcctcctgctcgctggaaactgttttttgctatcgatttgtctaacaacagcaccgacgacacactgagaagtgggcccgctatatgccacgtcagcaaaacaagggaaatatggtctatattggctttggtcatttgcactggctgcagcaagctgggtatactgttacagctgcataaaatgaacttgcattagggctggttgtagcagctacgctgttgcagctagcattaccaatcagcgccactaccattgggcttactttgcatggttttcaagatttgaggggtcaagatttttggtattaggaattagggatgccatacagactctgtgtgaagttgagggatggtcagtgaacttatgccttctgcagtagtttcagttcaacccatcctctcgagttttgggcttgggctgtcctgcaccctcgtgggccagaatacaactcggacattctccggatcatttgcaccccaacggttggggttattatcaaccaaactatcattaaagcaggtaaaaatacaacataaatatactaaaataccacatatatattttcacaaagttcagaaattaaaattttggtatgtcattccgatacgatgttggtgtgcaggtatatgattttttatttctatatgtacctatttaaaaaaaatacataatgcttatggtatattttttttcctgttgtccagctttccaaggcttgggcctcgccaacaccacttgagccggcaccaactcgtgatcgtgagcccgtcctcgctgactctcccgagtccctacgcccatcggttcctctgccatcactgcctagatttctcttcactactgcccgagctgccgccaacacagggcaagcttcgacatggccatcgccaagggtatcggtttttcacctctactttctccgcttagatcgtcttcaccaagctcctcacgcctattaacttgatgacacctaatatcaaaaggtatttattggctcaaatgagccacgggtcgtcgttaggccgttggtgctcctatggccacccgtcagcctcgtttataggtgggctgccccttacaccccgccctgactcctctccgacatcgtccgcatctttggcgtcctcccctaacctctgcgcttgagatgacgttgtccaattgttgctacctatataaggataaggggtagcctcctatgcctcgtgatccctcgatagctccgcggctccgtgtgggccgccaccagctgccacctgtcctcgagcgtgtcgtcgtcgtgtacttgagattggttgagggacatctgcccgtcctggtatgcttcacagcctttgttgcctcgctgctctcttgttgtgctctttactatgaacatgtgtttctgtcaacggaaaaaagagaatagattaggacttggtcatggcctagtgtgaaggactagaggggaacagttgcactgctaacttggtctatgtgccactgttgcactgcttatgttgtatcttttcctttgctattactctgttttttttccttttttttaaaaaaaaagagtttgggtttcggtattctgtatttctaaaattttcatttaataatttttaaaaaatattcattcgtcacaacacacgtgccatttttctagttagtgaaaaaaaatatttgaacatgattttagtgaagttatggatttgtcattgttttatgactctttgagcgtgtcttagaggtgaatttgtgagtgtcttgtgtatgtgtagtagtgtatacatatgcgtctttcatgtaattgcaaaaaagaaagaatatattttttacgcatactatcatttgatttttgagccacttgatttagattaaacccttcatattcattcacctttttcatataaactacattacctcctctaaccctaaccaaccgtcgccccatagctcctcgctgacatcaccaccgcttgtcagcgatgacctccactgcacaccctccttcccacgatcccactctccctcttcgttccccatcgaggaggttgtgatgccccgacaccaccattactgtgctagcccctggtgtgctctcgtctccatcaactgtcgtctcctaaacgcttgggcgttggtgccctcccacctacatcctctagcactagcggtggccctgtacctggagcctccatcattaattgtcacctccttaccaatcgagcctcacaactcgtagtctccaccgtcaaccgctctcctctgcccggtggccctagaagtgccactgccaccttattgttttcgaggtcatcaccatgttcttgccaccgttggacagccgtcggagttgttgggagtcgtcaaagctagagaaggagtctgcgcatgaaccttcaagctaatcaaacgattgtttgcagcattggatgtaaattctttgcaatactgctgatgcagtagcagtggctgacatgtgggtccagaatcacatgtaagtgcactagcagtacgacagacaatcttcactggttttatattggctttctacggcaagctggaataatcttatctaatactacctccgtttttttaatagaatgacgttattgaccttttgtcatatgtttgatcattcgactgattaaaaatccatgtaattataattttttttgttgtgagttgttttatcacacaaattactttagacattatttatatagcttatatatttgcataatttttttagaaatatgaatgatcaaaaatatgttcaaaagttaatagttaataacgtcatctattaaaaatatggagtaaaattaatatgcttcgtaatcatgtcaacccatgcatccgtactcacacgtacgatcacaaaggagaaaattccgttccaacttccaacctcagcacagcaccggcaaacttcaaaatatgtactccacacggttgatgacctttaagacacagggaaccacgctaggaaagcaaaagcggagcaaagcaaagaaaaagggccggtagaaatcaccgttcacaaggagtaatacacaccactcgattgttgtctcgggaggtaaaaaaaaatactgtcactatagtactaccatgtaccaccactgcaattctgtaccgagtccaggagtacttcaggatgctgagcaccggactgcatcactgcgctgtttcttgggttaatactagtagtacagcagcagcagctgagctttttaatttgccgcaccgccggccggtgattggacggatgtatttactacccaaaagaaacgcaattcagatccgtgcagtattgctcactgacatgtgggccccacagacccttgggcccacatgtcagtgagcagcactgaccctcgctcgtcccgcgagctgatggagcctttgttgcgctcgctaccttccggcctgaagggctgtagcatcgtcgtctcggccagcgaggagggcggcgcgacatcgcgctactcatcactgctccttcctgcagcaggcgaggcccctgcgactgcgagcgagtcgcgacgacggacggagggggccgcttcgcacgcgatctggtcgtgcgccgcgcaataaatcggtggggtgtccgcaggctggagggcgtttgatgaaaggctgccgccggatccgatcgctgccacgccgggtctaacgctttccctgttttgcctgcccgtgtccgtccgtgcctccgtggtcaccgtgcgtgttagtacgctcgctagctgccactgccaggtccggcaaatgccgtccgagtccctgcacaatggcgaatttcacgcgtgaacacgtaggggtgaaaacggtaacggtaattaccggccgaccggcattcgttttcgactttctaccggccgagccatatggaaatggtaatcgaccgaaacaaaaatggaaatggtaaaaaatatggaaatgaaaacggaaatggttttgctgttataccgatcgtttccgtatttaccgtattcttgcggaaattaccgtttcttataatatggtaattaccgtattctaaatatgtcgatattataggacatgtttatacttgacccacagcttatagattgaataactcttcaataaaatctctaacttttgtacatggctaaaatgaagttaatttataatttatatagtataagcttgaatttatgtatatatataacatacttatgtaaagttaaatatatgtttttatagtttaatgtttccgtatttgttaccggtttccgatctgtaccgacatgtttccgtccgtattgttccgtttccggttttccgatatcgttttcgtttccaactttaccgtttccgatttcatttccgagaaaaatatggttacggaaatggttgaggctgttttccgatcgtttctgaccgttttcatccctatgaacacgcagtgaatctttttatttggatcccaatgctcaaatagagatggatggagtagttcgtttgatctaacggcgacaactgtgggatcattacaccttatttatgctttgctgcaaaaggtacaaagagaacggcttattaagacgtcctttctgtatgttaaatgttgaaagctactccctctgtcccagtatagtggacgtttatttgaaaaattagtgcaaatataaaaaaaagataagttatatgtaaagtacttttaataataaagcaattgacaagcaaaataaataataatttcaaaattttttaaataaaattttttaaataagacgaatgatcaacaaatataaacaaaaactcaaaaaataataatatgggacggaggtagaagtagctacgagtgcttcggtacaacgtatgggggagattccggtcttgatagggattgataaacacgtttccttcgatatccccgatgcaccaacctggatagtttgtgtctaatgaagagtgtctgtgtatgttgcgtatactgtagagggttgtgcactagtgctagctacattcccagaaaacgtacacgccggtattcccagaaaaaaagaaatgctctactaactcgttgaccgattactatgaatgaactcggtttacattttttggtagggaagaaatctctgtatggacctgattttaataatgatacatccaaactaaaatcaccaaaaatgcgtgattttgggagtatatgggagaatattcttaagcttagtattagattcctcgcttttttgattgctagagacacaaaccatagaaggatatgtaagaatatacactgacatatgcggcctgactacagcgtgatatccagcaaaagcatataagacaactacggatggttggaaattccgtggagcttacttgccgtatataagattaaagaccagttttataaaggtcatgtatggagtttactattctcctgattattacaaaatttatattgttagtacgagattaagccaaatccacactcaagaattagcgtagattactatggaatattggataagatattctcactgacatcggcagagtttttctttttttttttttttaaaaaaagtcaaagcatcgtgcggtcctgcatatctatgggcttcttccaaattcaaggattttatagaattgttttaaaaagcgcttaccttttcaagtaacggagaaaaaaacatgccatgatccggaggtgtaacagtttctacactgctaattcaggaaatcgtcacatgaaaaaagcaattcaggaaatcgtcagggccttgtgtacaaaactaccacacctagattagatttgcacggcatcacatgtagtgcacgcgactcgcatcgcaaaaaaatttgggagaccacccacaaatcgctcgtcggcgagcgaatccaaaccaaatccttgttctagtcttgtatcacccgcatctgcgcgtccctctgcggcggcggcggcggcgacggcggcgatggggctggagatggaggggatggcggcggcgatcggcgtgtcggtgcccgtgctccgcttcctgctctgcttcgcggccaccatcccgacgggcctcatgtggcgggcggtgcccggcgccgcggggcggcacctctacgcggggctcaccggcgccgcgctttcctacctctcgttcggggccacatccaacctcctcttcgtcgtgcccatggcgttcgggtacctcgccatgctcctctgccgccggctcgcggggctcgtcaccttcctcggcgccttcggcttcctcatcgcatggtgatgaaactctcccccccttccatccgcttgtctccagggtttgcatactgctattgggtgattaggatcgaagaagccgtagctgcatgcctaatttggggttgacacacgagtaggacgagtagaaagagaaggctagggcagtttatttacaaaccagaggaatttttgaacggaggggtatgtggtgatgtggcggtgccagatttcatattcgagccgactcaaacgattttgactttttattactggtactcatgtggtcctacgtaacataagatttttaccgtgggaacagggtcttctattgaactccgcgtcgattcgcttgtatgcctgcaaacttcgaattggtgatcctgtgaagtttggaatgaataggttaatcatttgcttttctagtcctgttaactgcaaaaatataggagtgatggacttgcaataaaagctcattactactgcttggattgcatagtccacttatatttttatccgtagtttggtggcaaccctttgtgatgttttattgaaataacatagtaatgcatgctaatgtgaaaaacacatggtcaaatatgaaattttggttactgaacgtaaatgcaaggtagagatactctaggctgagattactatatcggaacattctgaagctccatatgcagtccaaaacagattttatagacctgctgtttttatgccatctttctctggtttctgccgtatctggcttcagaacagttcaggaaaggcccttgcatttacagtttattttgcagaaatctcattttattttcttggagtattagttccctgtgttcaattgcatgaggattgccactctccaatagcggcaattgatgattttccactcatgtctatgacacgtgggacaaggcccacatgcagtagtctatatgtggaaagtcgtcaaatggcctatggagaacgataaatcgtcagttttcctgataggtgttatgtccattaagtgctgatgtaaatatttcctggaattcactaattcatgtacatgcttattcatccatttgttactcgcttaatatttgcacctacgcactgatgaacagaagaaaagggatagcttttcatctatactagtttgggggttttttcgtcgtcttacccttcttagtgatccaccgcagtttatatttatgtgtatgaggtggaggttggtaagataaaattaggatatcggcctgctatcaattcttaaatagcacatcgttagtctcccaaggatttctgcattacactaaaatatggttcaagaatcgaaatcagcaatcacgcaagagatcttttactggtgttgcatctagtgtcctacgatgttcaagctagggttattgtgaatctgcaaggaatattgattttgttttacttggtgtcatgagagatgggattctgcagggtgaagcaacaagataaatcactgcaaaacagaaaagtgatgtgcaaaatagttgacaatgacagctgacaggagtggttcccaaatatccccaagcgttaagatgataatggtgctgtttgattcaccttaaattattttgttcagttgattgtaactgagtatgtcaactaaaagaaatgaagggatttagtttattcttgaaggaaacaatcaaacttggaactggtgatgttttatttgctgaatggcctattgatagattggcaatctgagtatctaaacccactccagtgactatgcagatataggtgttttcctattacaatctcattagtattagtgtttcctatatctctaaagaaattcatcctaaactgctgcaagtatctagtagggtctgccgatttggaatttcaaaatgagattgtgtcattccctgcataagcagtgtgaatcagaagcaatgatgttattctaatttcacgtagagagtaatcatgtcttctgctccctttatctcgtagagagtgcctgtcgatttggatttggaaatcctaagtttaccattctaatttcactcccatttatgttcatgccttctgctccctttctctggtccgctgattcgaaatttcaaaatgaggtcaggcatcctagataagcagtgtgaatcagaagcaatgatgctattgtaatttcactcccatttatgtcaggcttctccctttatctcatagagagtacctgccaatttggaaatcctaacgtttactaagttacctttttataaatgtgctccaatattaatgggctgagttctgtagtaagttttgcattattctcaaatcctgttttcttgccaaaagataaaacaatatggcaggctgtgatgccatgttgcaactagtacctaagatgatgcccgctttccattcttatgccattgcatgcgtcaaactaagcatctaacagagattaccaagaacctgattgagaccttaattggaaaaaaaaactgttattttccttcattcaatattctgatcagcagtctctgtcatcaagataagggagaaatatcaaacattccacaatcagattggatgctgtaaactgaagtatgcttatttcgaattcttaatacataactgatttctatttctagaaaccataatttctctgttggcgggatcctgataccgtgtcctctgtccgcactccgcaccctagtttcttgacttctttctggtacagtggtactaatgccatttttttggtggaacatggagcactatgatggaaagaaactactgtcagaattgggcaaaaacaaaatctagctaacatattagatgacatatccacgcaatatcaagaagatcagccaccaacaggcgatcatcatagtcctaaatattgtcgtgtttccactttacgccaactttgaagttagctaactcatcatctgaacatatatgtatttttatattaactattgtcctggcgttgtttactcacataaaagggtaaactataatatattgtcgtctagcgctttatttttctagtgtgctgttcgctattatttcctttatcttccgtaaaaaggtattcccttgtgcatatgcaaattttgaaaagcaaactgttagggaacaaaaatgtcttttggatctggatggggcttcttttacagactggtttaaacttaatccaatttattattaaaagtgtgttgtggactggaatgtggctggttggacacctgaagtgtgtgtttgtaacaagtgattttacagtccttgagtaggtactgataggtaccccattttatagtgtaaaatttggtacctcttgatacctccagtactagaaggtatgaaaatttgcactaaaaattttagtgcctcttgcctcttggtacctctcaagggctgtcaaatttctcatgtaacaaatctttttacctttaactcaatataaaatttggtgggctatcctttgccagctccttgtcttttcaagtgctatggacccattctaagtagtaggtcaaactgagtccacaccattaagactagggaaacatttgattgttaggaattatagttgcggtattaatgtattcaaatttagtcatgatttttgtcttggagatgcatggaaggaataataagcaaatgcagagatcctaacaggttttcatcctcttatacagtcacatgtactacatgagtggagatgcatggaaggagggtggcattgatgcaacaggtataatatagtgctctattgtttctcatacatatttcatatagttaaactatattcattggttaattttctacatcatttcgttctttttcttcggggaagtttttagaccatatctgatttacatatttgaaataagcatagaaaataagacatgtattgttttcagatccctagtattaccttatggaattttactcatctgtttttgctgccctgcttccttgtaattaaacactgttccacgaggatacggttcctcttttctagtaagaactagaccttccttttgagggtttagctataaaggcaacaaatttcataataacttaacttttgaggctacattttgtccattcaggttaaaacatcaaactttaggttttctggagaaggttttatttgtgtcacccctaagaaaaacattgtgctctgtttcaagtgtctttctggaattgatttttttctttttgcaatgcaggtgctttaatggttttaacattgaaaatcatttcatgtgcaataaactacagtgacggtatgttgaaggaagagggtttgcgtgatgcccagaaaaagtatcgtttggctaaacttccttctttgatcgaatattttggctactgcctctgctgtggcagccattttgctgggccagtatatgagatgaaagattatcttgaatatactgaacggaaaggagtaagtggcttttgtctgctttgtgtggatgatgttatgttttgtttattactgatattttcttgtctaaaacagttatgggccagcccaactccttcaccactattgcctactttgcgtgctctagttcaagctggcgcatgtatggggttatatttgtatctatcacctcaatttccactttcacggtttagcgagcccttatattatgagtggggtttctggcaccggctcttctatcagtacatgtcaggctttactgctcgttggaaatactactttatatggtcactttcagaagctgcaatcattatatctggtctgggttttagcggctggtctgattcatctcccccgaaagccaaatgggatcgtgcaaaaaatgttgatgttttaggtgtcgaattagctacaagtgcagttcagttgccgcttatgtggaacattcaagtgagcacatggctgcgatactgtaagttctgcatcctgatgaaatccatcatatcgtcaatattttttttaattttctttgttggatgatagaatgtttttttattgagtttaccatgtcggtatggaaagtgctgttgtgctttcccaaaatggatagcacgattttaaagcttactgaagatctgatcggcaatgacctattatgatccataattccacatcacttctacattatgtgcaattcagtttgcagaagagcatagaaacaatactctattaatatgtagtcttgttataagttaatttacagtttaagtgggagaagtctaaacttctaatatatgtgtttgacccttgaaattaactagttgagtaaggaaagtccatccacttgaattttattttgtgtaaaatctgggtatgcactaaacagtttgccttcttttaaactggataccattcgttcaagattactaataaatatgaattttgaaagcctgagccgatgatattcaatttgaatactattagttccataacactgattcaactatttcaattccactgttatttcagatgtttatgagaggttagttcagaaaggaaagaaacctggtttcctccagttgctgggtacacagacagtcagtgctgtctggcatgtaagttttatttttcatgaagattatattttgactttacttttttgtacttcttatcatctatagaatagcgccctgaacataattccatcaatacttgctatatgaaattagaatgctgtatatttagagcttctattgtcctagtgccctagtacccatctttccaagtagaggcaacacaagtaaattgtaaaatgtccttttcacttctgacatattctgatactgtattaaaaacttgttttctgacacttttctcataccaaggattaggtagtgcttaatatttttctaacttcatctcacatgaacatgttgaggcctggtttagttcccaactttttcttcaaacttccaacttttccatcacatcaaaactttcctacacacacaaacttccaacttttccgtcacattgttccgatttcaatcaaacttccaattttggcgtgaactaaacacaccctgagtgatctgattgtttctgttttacagggtctttatcccggatatatcatattctttgttcaatcagcattgatgataaatggttcaaaaggtagctctccctctctaatttcagccgctctaatttcctgagatgtactctattagttagaattatgaagttgtagttgatctgacattttcctcaatgcagtcatatacagatggcaacaagcagtcagcaatccagtcttccacgctatcctggtttttgtaaatttttcatacaccttgatggtccttaactactcatgtattgggttccaggtgagattgagcttctgaatcttgttttactttatagcaactgaaaaaaaaaagacttgtcagagtgtttgttgaaatgaatcctgaatgaaaatgttgcatttgcatacacacacaagaaaaaaaggtagataccattgttttgatccgtgcctttcatgactagtatatacatgtggtttttgtagtaacatttttagtttttactttatcaccatcttaagaaaagagcattgaagcctgaatggttctttaactaagtttaaacaatcgtgccactttagtgattttagtaccatgaagttatgaggttatgtaagagggcagcttaaactcaccaagcacacccgaagaaaatacactactgtagttgctgtcctattttattaataagaaaataccgtgggttgagttttgtgtctcttgacagtagttctagtattaccctgtaatgtgaaaagatgcctttcctctattgttttgtgtatagtttgtatttaccatgctgtatactcttcgtttcctccaggtactgagcttcaaggaaaccctagcatcctaccagagcgtatattatatcggcacaattgttcccattgtagttgtcttgctgggttatgttatcaagccagccaggccagtgaagccaaaggctcggaaggcagaatgagcaacaagttgacctggtcaagtggtcattacatataggagcgacgaagaacatttaatgacgataatgacgaactagtgtccagctattctactgtggaatttcgcaggagaatgtgatgactcacctcttaaagttctgaactcccttgtgattgatcaaacattaaaacgtggcactcccgttggatttttcttctatgttatgactactactacaactacataggatatcggccttgcgccttcggttgttgagttctcttctgaccgactgtcattcaaagcgatgtattttttatcaccttccctggcctggagccaaatggaggtgtgaatgggcatcatttcttggttcacatccaatgtgtccttaccaactgagctccaacaacactagcagtttagcgcccatgttttgactcatggcttactttgaacacaattttggtgccatgatagctaaactcgtggccaccgagtagccatatggcggtcatagactacttactgaatccggcgccctctgctggtcattttggtcttataaatggtgctacggaagtgcaaacctgtgggtggtctggtccaaactaatactcctactactatgccgcgtcgcagaggtggtaggtttggtgctggctggtggctgcgtcgtgtttgggtcccaggattcggcaacctgaaaatgccagccgtggtggtctgctctgtcaccccagggcggccagaaagggcagcgtagtgtgctacagtgctatgcagggaaaaggcgacgccagtgacacgacgtaacgtggcgttgatcaggtcatgaccaatgaccgatggcgtccagattcctggttgcaaaaactgcaatatacaacgagtcatgctgcactatctctagtgcaatgcaatgcggcgcatgctgcgtatacgtgcgaaagacaatctcctggcatcttttcccagagaaatggacggtctaatagtccggaccggcagccgctttttcaaacaataacgcaaaaagttctctagaaattcatggagctaatcgccactatacaattcccgagacaaatcaccttcgctagctacggtttctagacagcatttgtctctcccatatcgctttgatcgcggtgcgtgcaaaactgcaaattgcaatccgcgtccatgaattcaacgtttgcgacaccggctgggctacgggaagaagactcgatcgaccgcctaaaaatccggtcgttttcaactgtctcatctttgttgtgccggcgccgcaagagctgcacggtttcgccaccgtcttcgcgcacctggccgtgtctcacacggccgggccggggtggcacacacgcaccgcacgcgtccttgccgtattccacccggctaataaccgcagcagcatgggcgtattaccagtttaccaccaccagcagcagcagcgaccgtgcacgcaggcagagcgcaatgcagcgcgacgctagctggcgcgcgctccaccatcgcccaatcgcccatgccctggaggcctggaagcgtacgtcgtgcggtgcagccttgccggcctggttaattctgcagcggcatgcaggccacagttttgctagtataaaaaaagaaaggagaaaaaaaaactggccggcatggcatggcttggcgttggtgggtgggggatatattgacgggacagcggaccacctgagattcgcaacgagcgtgtcgtcgatcgatcggccggtggagttttgtggattccgtgcccaatcttttgtcaaaaacggccactttgcctctacagttacctgcactgccgccggccggctacctatagcttgggggtaccactctagctacccagctttgccaagcacaaattaacacacacacagctctgctcgttcctgacaccctgcatgacaccaccgcgtgctccccacagactcagcaacacgggagccaaaggggaaatcacctcagacaggctcaggctcaaggcaaggccgggccgcaggaggggtggccatcacgcacactcatcacatcacctgcgtacttactcgcggcacgtgcctagccccccctctctctgatccaccaatcgaacaggcgcgtcgtcgttggccccgagcgacgctgcacacatgtacagttccacctgaacgtgtacgtcaggtgcaggcgcgtgcgccaccacgtacgtactccggccactagctgatcactccgcgcgtgccaccgctcggccggacggctcagcagaggcgctcgctttgctcttgcttgcccgatagatcgctcgctcttcttttgcgccaaatgcgttgcacatcttgcattgcattgcatgcatgtatcgcagtctcgcagagctgatcaagccccagcccctacctataaaacactggcacggttacgtacgctggggtcgccttgtcgtcgccctcctgggtccagattcctcgcccgtttgggtcgtctcacgctggatcgatccggccgtgtcagggatcatagtctcagagatctgagtgttagtttatcagtagatcatgcatgcatcagcctgtgtactagactgtagacatgtctagctatgttcagtaagttttgaccacgacccctgttcttttacggagctgtatatagctagctagctagctacacaaacggcgagcgatatttttctaatttcctacagcaacaggatagtggatacatatatcgacatcgatgtaatccttggtgtattctacccctggacgacggttagcaattccctaaattaattaaccatcacattcacgtgtaaattaaaacggccacataataattcacaaagtccacggacctccatatatatatgtcgccactcgccacgtgtgctaagagtcacctgataaataaataaattgccattgcaaaacttactttggccggccgcaggctgcagctggtttcatctgattactagttcagataacgaaagcgaaatccacaacggcgacatatgaaaggaaccccgggccatatcggtgtgtgtggtgcgtgcatttgcatcgttttacatgatgcaagcgttttaattcattaaaatgtgattcgcgcgagcgcgcgcgagctgtccatctgccaaatgttcatatgcatatggcttcgaggttttcggtcatctattcgtacagtaattggatagagttggtagagctagctgacgtacgtgtcagatcagaggaaatgtagctgacaccggtggctgatcgtggtagcatcggtagtgtagtgtacgtacgtatcgccggcccagttgtattctactacctccgtctcaaaatgtagttatttctagcatagtactttgtcctaaaatgaagctattttttacctaccttctcctctcaaccaatcacaaccattctttttcacatactttctcttttcaaccaatcacacacctttttcaaccattctcacctactttcttaatacccgtgccaacttcaaaaatgcttacattttagaacggaggaagtagaaaataatacggtcctttggaattaatgtaggaaacccaaagcacagaaatcgagttgcatggtttctaaaaaaatagtaatacggaaaagaaagtttaaaaaattaagaggtttttatccactcaaaaatgattttatttgtaggttttaggctttccttttcacaggtggcataaattttcatccacatgtgaagatggctgaggccgtctcaaggtcacagatcagctctgagatgtgtccttaagaaatggataattgaacctacatctaaagagttctattaggttttgagctaggcggtaggtgtctactctatctatatatgttcagattcgtaatattagaatatgtcacatccgattctagatttactttttatagaacggagggagtatttccaaaccttaatcccatacatgccttctcatcccaattcttaattttcagctgaatggattatgtaattttgtgataataattgagagtataaatgaatggattaatatttataaagtaaaagttgtttaaaaatatttttaaaaactatatatatttttaaatttaatataaatcgtactgtttagaagtttgaaaaatatgttgatgataattcagaatacgtaagaggaaattaaagaacgtatcatatatatctatagtcacctgcggtcgtgcgaaccttgctggcacccaaattaatacccaatgctgtacccaaatttaagctcccgagagaagattcaattcaaatcctacacaagatcgagaggagaggtcaaaaggaaatttgcaaggggcctgcacacattaccaatttcctagtacatattatagtattaatacacaactccatcacccggccgcgacaacaaaatttcggccgcatgcatgcgaatgcaaacaccggaggcgccaaaagagaggcgctttcactggtgcaaatggcatttgcggcatatgcatgcatgcatgcacaacctgtgcgtcgtccgcatcgctgcaggccaaacacagccttgttaacgcccgcccaactttaaccagcgtataggtatcgacaaagccctatgcaccgccaagaaatatacagggacaagtgctcccaaaactccaaaagttcggtgtactcaactgctcctccatacatggatactatccccaatctgatagattatgacggaggcaatcatcaaattgaaggttatgcatgtaaagcttagcagctagcattgtgctgcgctctcgtttaactaagctggccggggtagatgctgttgaagatactctagcatatgtaggcatgagccacgcatctagctacccaaactcaacgtgagtatttgtctggactcgttctggacaatcaagagctttggacggcttgaattgcaccgtcgtccattgtatgcactcactgtttacttagtactctccttgttctataataaaccaatctaaattcgaatttgtttgtttaaatttgttgtattaaataatatttcattatatttcaggcatgtttattttgagatcattttatccagattcgttatattatactcccttctattctaaattgatcatcatatatatttatgcactaagaccaaggataatttaaatcgcatcaatcaagacaccgtacacacattctcctacatgcatcgattaaaacatcatccaattacaccctagcatgcacacattcttccatgctgtattaattatattacgatgaaatccgcaactatgtggttatacaatgattaatttgagaaattttggattccattatatgataatcaatttgggaaggagagagtatcttattttattttaggttggtttattatgaaacaaagagagtaacttatgaagctaccaatcaactctagcctacatatgcattttgcagggggaatccatccctggtaggatgatgacaagactctcccagggacccaaaaattcttgatggattctcccgttttataattaccgtataatatggtcacttgctcactagctagacagtagtcactagctaggtccattgcatgcatgctgcagccatgacatggacgcatctaacatggcatggacgcatcaagctagtagctcgatcgcggccggagtacaccttccgtctaaaaaaaaaaactttcgaaaataatctaaacaattgcttatcaaagtttcttcataaaatttgatacgtatttttatggaacggaacagagagagcatatgccactaactggatacgtactatctgcaagctagcgtccaattgcattatatcttcattaggcataggcacgttcgatcagttctctgcatgcgcatgcgatctcctgcaaagtgaatatgcagatgattcagatggatctccacgatcgatgcatgcatgcatggggtgttgtaccgtacgtgcgtgtggatgcatctgctcaatgtcgtcgcagacatgcatgtaccgttttcctgatttggcaacatgacacgattgcgttttgcaccgatcgcccctggtttggctataccatttgcaaaccccatagcctgtaattaatcatacttaattagcaacgttaatcgctatttgatttagctagcgacaagtggcagctaggccgcgaccttttagctagctaactagaatggtggccagatgcggtggacatattatttcctagatgcctagtatctagcagattttactagcttaggtctgattaaaatagtttcaagtgacctaaacgagcatgcatgatttgtggtggtgttggcggtagtgccggccattacactagcatgatcatttagtttagggatctcaagttactgcagctggaagttgtcaaatgcgaaagtgcaacctctttttttttagagactagcagtatcaatttcaaatgaaatgatactggtctaaacaaacctcttcattgtttttcatttcgatgcttctccgatcccttcaatcatttttgatgtttagaacaagactcgatcaccatttaaaactccgaccatcaataacatttttcatattttctcatatgctcaatgtaaagagacaaaacaattaccctctctttatttcttaatatatgatgccctgaacttttgacgtgacgtttgattgttcgttttattaaaaagttatataaatattatttattttgttataacttattttatctaaaaaagttataatcttaacttatatttttacatatttataataaaattttgaattagacgaatgatcaaatgttataaaaaagttagtggtgttaatatatataaaaacggaggtagtagtataagtcaaagagtatcaaccttatcgattaaggtgccaagatagttaaactaattcccactactaaagaatatatctaaaggaatatacatataatatatatggggaatattgtcacgccccgaactaatcccgaccggaactagcccgtgacgctccaaattaacctgttgatcgataccagtcccaggaaacagtgctggtatcacagggagacagaatatcacagcaacaacggtctctttattatagagtagagatacagtcatgttgggctacggacagatcccgagctcacaactgcattacaaaagggaaacggaaaccaggactaggaccaaccaacacaggcgcgacttgggaactaggccgaaaccctaaaactcatcgtagccggcttgctcctggaagaactcctcatcagcaggatccgcttcatcttcttcagcaactgggggggattatttatatagagcaagggtgagtacgggagtactcagcaagccaagggaaataagtgtttaatgcaggcttcaaggaaaggctgttgtttttgcagttgattttatttgaactcttttctaaaaacaactaagtgagtgcttctcaaacgacacggttgagacagtgcgtctcgtccggtcggagtatgtgcaatgtatcagtctttaaaatttgaaaacaaggttggcacccggccaacagcttttcaaacggccacccgggccaacaactttcaaacggccacccgggcctagctgatcccatcagctgcagattttacaaacatcgaacccctttccacaacagcaatttcacaagcagtagtcaaacaaaactacgctaggaatcacctcacatccgcccatgaccgtgggcatggctgtttgaacagtttgataacctctacagacggggtacactttacccacacgacattactaacccggatcacccagcccgtggggatcagccacgtcgggagacctccaagctttcatgacaaggcatttccaaagccgacacaggtttaccatatgccgacgagaggggtcccagaccaacaacaggttaggtcccagaccatactgtgccaggaagcccaagggtcctccccgacaccaccccggcgaatccacatgtctctcggcatcaaggctcccctgataagctagttactcagccaggggtgtcccattccacccatgtggtcgtacttgtcttatgtttggatgaaattccaaggaaacggtccttaagtgcaagagcggaaaaccgtacacccggtacgttccccggtccgcggtttcggaaattcatttagttcgcaagcaccgacccaggtgtcgggttttccaagtcttttgtaaaacccaagttttacccaagttgttactcagattttaagtttgaaggcgaccgtcgatactcgcacagagtgcacgaatatcgaggcgcaactagatggttacaaggggacatggtatcacaattaacaaaggaaggatcaaatgcaacaaattaggtaggtccgccaatctgccttgcagacgggacaacaggttaagtgcgatcctatcaatgcataatattttcaaacaacataattaaatttcaaatataggctcaagatgttcaaaggtggcttgccttgctcgagatctggagcttgatcctcgaaatcctcgcgctgcgggtcttcgggctccgaaactacacgcgaaacgggacaactcaacaaacggcgaaaataaagccctattaatgacctctaagcgtgccattagatagatctcgagatttgaggaattttggaagttgaacggagtcaaacggatttacggttgggaagatattgaatttctaagattattggatttttggtctaaaggaaaaggatttaattaaatcctttttgaaaaagaaaagaaaagaaaggaaaagagggagggaaaatagacttttcctcgggcggctagggcgtggcccgagagagatggggcggtccggccgagctaaatgggccggccggcccaaggcggcccaagcgcgcgcgcgggcggggaggagagagagggccggtggaccgggctcaccacgcgtggtcccgggtgggacccgcttgtcagcggctcggctcaccgtgcggagggagcacgcggcgcggcgctagggtgggggagggacgcggtgcacgcgcacgctcagggtggaacgcacgcacgggagggactgaccgggtcggcccgatccgatctcggccgagctggcgccgacgtggcgcctacgtggctgccacgcgggccggcgggaggtagacgacgacgccggccggaacggacggcggatgacagcggcgagcggcggagcgaaccacggcgataccgttgaaagcgagtacaccgggtggttgctcaggacgaggggagacgagccaacggctcggattcgccggagggagtccgtcggcggcggattgcggcggcggcaaccggcagagagaaaaggggaaaacggcgacgaggtcatgaggggccaattcccggcggtgagagcatctacgcggctatgggaatccgttgctagcgtcggattgggcggagctacgccgagcgaggccggcgacgagcggcgcttccgagctcgggcggcaacggcggcgagcacacggcgagcggcggcaacggccggggcggcgccggctagctacggggaggctactcgtgctactaccgaaaactaaaggggagagatggagcgaggaggaagaacggagggaggcactaccgtgcggatggggcgcagtgacgagaggccgacggcacgggagtaaactctccggcctcgggccggggaagaggaagaagagggcgcgcccggagtccccttccgcgtcctagtgcgcaccggctcctccggcacgcacgcgacgacgaacggcgacggcgaacaggggcgacagtggcggcgagagacgaaaacgagggagattggagggggaggggcttgggtttaaatgggcggcaatgtcggtttgggagaggggaaccgacattggacggtcaagccggcgagctggcgctccggctagcggccaaaacggcgacagaaggtgattccggcgagagggaaaaacagagaaaaaaaaggggagggaaagggggcttgtcccttgcctctttgggaaaaggaggaggggagcgggggcgacgcggcagagggagggggagctctgcctccgtcccttggcggcttgcgcgcggagaggcggggccgaggcgatgacgacggcgatgacggtggggcggtgtggagcggagcggcgacacgagcgacaggcgcggcagggggctgacggcggcagcgaccaggcagtcggccaccacggcacacgcgcgcggaaacaacgggcggcgcggtggtttgagcggcgcggctcaggcacgcgcgctggctagcgggatcgggcggctgcgcggacggcgcagacgcgacgcgggcgacgaccacgcgggcgcgcgcgtgaacgacgcgcggggagcggcagcgagggagcggaaaggaggactcggctcggcgcggccagatcacgcgcacgcgcgcgggcagggcgcgggcggagcggagggcgctcggcgcgacgctcgcgcacgcgcgcgcggcgcgcgggcggagcggagggggaggaagagagagagagagagagagagagagagagagcgccgggaggtagggggagatgggccaatagagattcggcccatcgaccccgggggaggcaaaatagacttttgcggagggattgatttggaaggatttggattcggaattggactcgacgatagatcggggattgagatccgagatggcacggacactagacaacaagcaaagaaacaaatttcgcaattagggtttttaagagataattttcccgctaggcgccacgacggaacgggcgctacagaccaacccccctaacaagaatctcgaccccgagattcagcacctaggggagcagctccgggaactctgcgcggagaagatcttctcgctcccaggttgcctcatcttcagaatggttgctccattggactttgtagaacttggtggtcttccttcgagtctgacgttctgcctctttaagaaccttgatcggtctttccttgcaggtcagattcttttccagctcgatattacccagggggacctgctcttctggaactcgaagacatttctttaactgggatacgtggaacacgttgtgcacatctgcgagaccttcaggtaactcaagctgataagccacttcgccacgtctggcggttatgaggtacaggccgatgtagcggggtgctaacttgccggacatcccaaacctcctcataccacggaggggtgatacccgcaggtacacatgatctcctttttcaaactcaaggtcacgcctccgattgtcagcgtaattcttttgacggttctgcgttgtctttaaacgttctcggattagcttaacttgttcttctgctgccttgagtatgtcaggaccgaatactagcgcttcgcccacctcattccagcacaagggagtatggcactttctcccgaacattgcctcattcggcgacatctgaatgctggcctgataactgttgttgtatgagaactccgcatacggcaaacaatgatcccaagtgccttcgaaatccagggcgcacgcacgtagcatgtcttctaggatttggtttaccctttcggtctgaccatcggtctgcggatggtaggccgtactaaaatttagatcggttccgagggcttcatgcaactgcttctagaaccttgaggtgaactgagtgcctcggtctgacacaattttcttgggacagccaaatctacatacgacatgggtcatgtagagttctgctagtttctttccatcaaaggtggttttcactggtacgaaataagctgatttcgtgagtcgatccacgattacccagatggagtcgtacccgctatgggttcttggccaaccggtgatgaaatccattccgatctcttcccatttccactcgggaatcggtaggggttgcagcagaccagctggcctctgatgctctgccttgactctttggcaaatgtcacacaaggctacgtattctgcgacatctcgcttcattccagcccactagaagtatgccttgatgtcttggtacatcttcgtacttcctggatgaatggagtaggcggactcatgagcttcctttaggatgagatctcttaactccttcttggtcggtacacagatgcgtggaccgcaccaaactgtgccttgatcgtctatggagaaattggtgtctttcttctcctgtattctttttattaattcttttatcccttcgtcgtctttctgagcttcccggatttgcgactctagggtaggctgcactgtcaagctggcagggacacctgactgtaccacggtcagcctcaacttctccaattctctgcacaggcgatcttggtcaggccgtatttgagctacattgcaataggccttgcgacttagcgcatcagcgaccacgttagctttaccggggtggtaatgaattccaagatcgtaatccttgattagttccaaccatcttctctgcctcatatttaactcggtctgagtgaagatgtacttaagacttttgtgatcggtgtatacttcacatctgttcccgattaaatattgcctccagatcttaagagcatgaaccacgactgccaactcgagatcatgggtgggataattgacttcatgaggcctgagctgcctggatgcataggccacaacctttcgttcttgcattaggacacatcctaagccttgtcttgatgcatcacagaagttctcgaaatcttttcggatatctggcaaggtgagaactggggcagtggtcaaccttttcttcatttcttgaaagctgtcttcacatgctgcagaccattgaaatttcttttccttctttaacagctcggtcataggtctggctagtttagagaatccttcaatgaatcttcgataatatccagctaagccaaggaagttgcgaatctctgacacattcttgggcgggttccaagcaagtacagcttcaaccttgctgggatctacttcgacaccgttggaggagatcacgtgcccaagaaatgctactcggtctaaccagaattcgcatttcgagaatttagcgaatagttgatgatttctgagcttttccattatcagccttaggtgttcagcatgttcttccttattcttggagtatatcaggatgtcatcgatgaacaccacgacaaactggtccaggtattacataaagattttgttcattaagttcatgaagaatgctggggcattggtgagtccgaaggacatcactgtgaactcatatagaccataacgcgttgagaaagcggacttcggaatatcttcaggtctgattttcagttggtggtaacctgacctcaagtcaattttagagaaaactcttgctcctttaagttgatcgaacaaatcgtcaatccgtggcaatgggtacttgttctttatagttacttcattcatggctctatagtcgattaccattctctcagagccatcctttttcttaaccagaagcactggggctctccaaggggatgagctaggtcgcacataacctttactctccaattcttcgatttgtcttttaacttctgctaactcattagctgccattcggtatggtctttttgcaattggtgcagtgcctggcgccagttctatggcgaactcaatctctcggtctggtggcatactcgttaattcttctgggaatacgtcgggatattcacagactatgggtaccgactgcaaggtggtgacttgtaaacaggttaggatagaccgacttgcggtaggggtgttagaggtaaagcggacttgctttcctccaggtccttgcaaggtgatggacttttcggcacaatctatctgtcctttgtgcttagccaaccaatccatccctaggatgatgtccaagctttgcgagtctaggactatcggtttggctaggaagtcaacttcctcaattctaaggttaacttccgggcatatttgagtcgcccttatattcctcccaggggaatgtactatcattggtacacgtaaattttgggttttccaaccgtttcttttcacaaaagcttgtgatatgaaagaatgggaagctcccgaatcaaagagaactattgcgggtacggagttgacagagaacatacccatcacaacgtctggagcatcctgagcggtctcagcttgaatgtggttcactcggcctcgaccaaagttgttggaagcacgtgaaccttgtccacttgcctgagagctaggacgagactgagctgccgctggagtaggagtcctggcagtgctgccattagcatgccctgagttggtgttggtaggattctgagggcactgtctagcatagtgacccatctggttgcaccggaaacactgaactgctgacggtccctgcggtgacttgaaagaggtaacactgtttggcgcagtattgccactaggggcacgctgctgtggctggggtgccggacggttcatctgaggacgaggggcgtagcctggctggcggttagcctgagttaccgactggtgatattgcatgggttgaccacagcgagggcgaggtgcgcctcgggaagaatttccctgatggtttgacttgcgtttcttgtattcttcggtagcctcttttctggcatcctcaagtagaagcgccttgttgatcatatgttgaaaagtggggaagtcatgagcaagcaactggagtctcattccaactgcgattcccttcaagaatttcctgatcttcttcttgtctgtgtccacttcctcaggggcgtaccgagccaacttgttgaacatacttaggtactcattgacactgctgttgccttgcttaagtctgttgaattcctctttcttcatgtcaatagtgctttcaggcacatgagctgcacggaaagccgtagcaaactcatcccaagcaatgttagtgggttcagagtgtgcattgcagtaattctcccaccaatctgcagcaggtcctcttagctagtgagaggcatagagcgtcttctcaacaggagtacactgcactaagttgagttttctatcaacatctttcagccaatcgtcagcctcgatgggctcgacgttctgagagaactctggcggacgagaccttagaaaatctgtcagcttggatctattgttgctcatgtgagggtggccatttccatgcgcattatgctgaaaaccggctacggctgcggctaatccttgcaagatttgtgtctgaaccgccatcaggtgctgcatgttgttttccacatgaggtggggaagggaggcgttcctctccagaattgtgactggcagtgcggtgagagcggtgagactgttccatctctgtattacgggaaactgtgcgatgcgagcggttgctgcggcggggttgctcaacttctgcgttgcgggaagcagtacggtgcgaacggttgctgtggtgagactgctcattagctgactcatgattttcttctggctcaactctaccttcttcaaaaccgaagcgggctggtgcacgagctgcacggcgggggcggctagccatctaaactcccagaagaaggcgaggtaagagtcagataagcacttaggagggcaaggagcaaagtaaatagcaactcagatagcacacactaggcataaactggatttttcaaatcataaaaacacctgatacaacgggtgtggacaagtcacagagctacgccgagcttgactgtgcgcacaccacctaggagaaccagactatcaaacaacacccacaacaaacacacgcacgcactacctcgccacgactccgaaagagttggcggtggaacaaaagagcctaacacgcggacggctgctgaagactacctcctctactcctcgtcggcctggctgcctcctgtggtcggctcctcagtcgaagaaacgtcgatcggctgacgcgaagggaccggcggaacctgtcgagggccggtagcagcacgggccgctggcggtgggggagctgggtagtggaaacggaacacggtggaagaaccaacaacacgcttctgcacggtgcggataaagcgtgggccacggcgggaggaagcaactggggtgtgtccgggggtgtaggaagggctaactgggtgtgggtagggggagtacactggtgagtacggcgcacgcgagctgggggagcgcggaccactgggagtgcgagcagagccgcgggagctgtgggaggacaggtggttggcatggcagaggcggcctgagtcccaagagatagtgtcaactgaggtgacaccctcctcggccagacgggcctccaaggcggcgtagcggcgggcaagggagcggtaagcctcaaggagtaggtcgtgctgagtggcctgagcctccgaaagctcaaccatgcgagtcagcactggctgagactcgctgtatggacaagggtacctggcgtccgcgtggccagaaggaaggcgtggaagctgccggaaggcggagcccccgagacggtggctgtagtcgtgggccaggcgacgaagcgtagtccaggagaggtcctggtacgcgatctggagagtgggcctggccacagtgaagtggtgcgggcgaaggccagctccgtgtatacctccacgggggtaaaggtacacagagagctcacagtgagagggaacacggtccacagagtaccctgtgtactcgggacacggaagccaaggaaacgggcgaggtcacgaagctgagcgacgtggtgaccctcaccaaaaccgtgggaactgaagctggcgttcactgccatctacaattttgaaagagggagaaagatcagtaaccattttagaaacaaactattgaaaataaagaaaacaaaagaatccttagcttttcgcaagtagttttgaacttagtatccttagggtcgtcctaaacgtcgggtttcgccctagggccaagcctgtgctctgataccatctcttgtcacgccccgaactaatcccgaccggaactagcccgtaacgctccaaattaacctgttgatcgataccagtcccaggaaacagtgctggtatcacagggagacagaatatcacagcaacagcggtctctttattatagagtagagatacagtcatgttgggctacggacagatcccgagctcacaactgcattacaaaagggaaacggaaaccaggactaggaccaaccaacacaggcacgacttgggaactaggccgaaaccctaaaactcatcgtagccggcttgctcctggaagaactcctcatcagcaggatccgcttcatcttcttcagcaactgggggggattatttatatagagcaagggtgagtacgggagtactcagcaagccaagggaaataagtgtttaatgcaggcttcaaggaaaggctgttgtttttgcagttgattttatttgaactcttttctaaaaacaactaagtgagtgcttctcaaacgacacggttgagacagtgcgtctcgtccggtcggagtatgtgcaatgtatcagtctttaaaatttgaaaacaaggttggcacccggccaacagcttttcaaacggccacccgggccaacaactttcaaacggccacccgggcctagctgatcccatcagctgcagattttacaaacatcgaacccctttccacaacagcaatttcacaagcagtagtcaaacaaaactacgctaggaatcacctcacatccgcccatgaccgtgggcacggctgttcgaacagtttgataacctctgcagagggggtacactttacccacacgacattactaacccggatcacccagcccgtggggatcagccacgtcgggagacctccaagctttcatgacaaggcatttccaaagccgacacaggtttaccatatgccgacgagaggggtcccagaccaacaacaggttaggtcccagaccatactgtgccaggaagcccaggggtcctccccgacaccaccccggcaaatccacatgtctctcggcatcaaggctcccctgataagctagttactcagccaggggtgtcccattccacccatgtggtcgtacttgtcttatgtttggatgaaattccaaggaaacggtccttaagtgcaagagcggaaaaccgtacacctggtacgttccccggtccgcggtttcggaaattcatttagttcgcaagcaccgacccaggtgtcgggttttccaagtcttttgtaaaacccaagttttacccaagttgttactcagattttaagtttgaagccgaccgtcgatactcgcatagagtgcacgaatatcgaggcgcaactagatggttacaaggggacatggtatcacaattaacaaaggaagaatcaaatacaacaaattaggtaggtccgccaatctgccttgcagacaggacaacaggttaagtgcgatcctatcaatgcataatattttcaaacaacataattaaatttcaaatataggctcaagatgttcaaaggtggcttgccttgctcgagatctggagcttgatcctcgaaatcctcgcgctgcgggtcttcgggctccgaaactacacgcgaaacgggacaactcaacaaacggcgaaaataaagccctattaatgacctctaagcgtgccattagatagatctcgagatttgaggaattttggaagttgaacagagtcaaacggatttacggttgggaagatattgaatttctaagattattggatttttggtctaaaggaaaaggatttaattaaatcctttttgaaaaagaaaagaaaagaaaggaaaagagggagggaaaatagacttttcctcgggcggctagggcgcggcccgagagagatggggcggtccggccgagctaaatgggccggccggcccaaggcggcccaagcgcgcgcgcgggggaggggaggagagagagggccggtggaccgggctcaccacgcgtggtcccgggtgggacccgcttgtcagcggctcggctcaccgtgcggagggagcacgcggcgcggcgctagggtgggggagggacgcggtgcacgcgcgcggttcgtggtggacgcggatgcggcgggcccacgcgcagcctcacggctcgcggtggaacgcgcgcatgggagggactgaccgggatcggcccgatccgatctcggccgagctggcgccgacgtggcgcctacgtggccgccacgcgggccggcgggaggtagacgacgacgccggccggaacggacggcggacgacagcggcgagcggcggagcgaaccacggcgataccggtgaaagcgagtacaccgggtggttgctcaggacgaggggagacgagccaacggctcggattcgccggagggagtccgtcggcggcggattgcggcggcggcaaccggcggagagaaaaggggaaaacggagacgaggtcacgaggggccaattcccggcggcgagagcatctacgcggctatgggaatccgttgctagcgtcggattgggcggagctacgccgagcgaggccggcgacgagcggcgcttccgagctcgggcggcgacggcggcgagacacggcgagcggtggcaacggccggggcggcgccggctagctacggggaggctactcgtgctactaccgaaaactaaaggggagagatggagcgaggaggaagaacggagggaggcactaccgtgcggacggggcgcagtgacgagaggccgacggcgcgggagtaaactctccggcctcgggccggggaagaggaagaagagggcgcgcccggagtccccttccgcgtcctagtgcgcaccggctcctccggcacgcacgcgacgatgaacggcgacggcgaacaggggcgacagtggcggcgagagacgaaaacgagggagattggagggggaggggcttgggtttaaatgggcggcaatgtcggtttgggagaggggaaccgacattggacggtcaagccggcgagctggcgctccggctagcggccaaaacggcgacagaaggtgatgccggcgagagggaaaaagagagaaaaaaaaaggggagggaaagggggcttgtcccttgcctctttgggaaaatgaggaggggagcgggggtgacgcggcagagggagggggagctctgcctccgtcccttggcggcttgcgcgcggagaggcggggccgaggcgatgacggcggggcggtgtggagcggagcggcgacacgagcgacaggtgcggcagggggctgacggcggcagcgaccaggcggtcggccaccacggcacgcgcgcgcggaaacaatgggcggcgcggctcgggcacgcgcgctggctagcgggatcgggcggctgcgcggacggcgcagacgcgacgcaggcgacgaccacgcgggcgcgcgcgcgaacgacgcgtggggagcggcagcgagggagcggaaaggaggactcggctcggcgcggccagctcacgcgcacgcgcgcgggcagggcgcgggcggagcggagggcgctcggcgcgacgctcgcgcacgcgcgcgcggcgcgcgggcggagcggagggggaggaagagagagagagagagagagcgccgggagggagggggagatgggccgagagagattcggcccatcgaccccgggggaggctaaatagacttttgcggagggattgatttggaaggatttggatccggaattggactcgacgatagatcggggattgagatccgagatggcacggacactagacaacaagcaaagaaacaaatttcgcaattagggtttttaagagataattttcccgctaggcgccacgacggaacgggcgctacaaatatgtcctaagatattccgttataatttacctaattgctcctatgtgggtcgtgcaagtgtagtgaagggtatagaaagggaatttttcccttccactcctttaaatatatccatgagtgaaccctagaagggattatcactcccattcatacccacaagacttggctgcctttctctctccacctctccttatccaaatggttatgcatggtctctaaatattctctatgtttgttactcactataatactgtatacagctgatttatctcaaaaatactatcgttgaatcatagatttatttgatcctataaacttattctaatataatcttgacggtcataattttacaagttcaacggaatcgtattctaaatatcaaatatttataaccagatcgaggtacataatattattattttttattcaaatatgtaaccaatataattatgttttatgtatataggcgtgacgacataattataattgcagaggacaattcatatgtgttgccaagagcaagcgttagggtgccagatggtgagctgctggagcatttgacctgccctctcatatacatatatggtgcatacttaattttgatttattatatatgctataatatataaggcctgagaaccacattttgtcaactcatagatacttgttaaaacagataggaggggttgacctatatatgatatagcgaagccagaaatgtcaacccaaagaactgttttaatctactgattaattagcacagctagctatatatatgcaggaaaataaggaaacatcgctgccattacacatgggaactcctagctagctagctaacaaaatcatgtgagaatcacgcattccaagccagtagcttggcctaaacatgcatgagactaacatgtatgcagccagttagaacacatccacgtgcacgtgaacgatttttagggtcatcttccagcaaggccggctgttctcgtcatggcctaatgaagggccatttgcattggccctcccagtactcacggtgtagtacattgcccgcgccggcagcgtacggcagattatatcgaaaactagccagagaacggcgcgcgtcgatctctgatcatcagttctcatcgccctcccatcatcagtcgtcagtcgtcacgcaccaaccaacgcgcgcgccgcctcaatgccaacgaacgacatcctatgccctggtaccaccaatttctctgcaaaactaaagatcaaactcagtaagatattactaattaatctctcctttccttttctgaatacattctattttaactttaaaattccgattatatgattttgatatgttttttttttcactactattcatttgatcatctccttcgaatcacctagtgatatcagattgtaggatttggtactgtttgacatgactccaacttgtagattattcatgtagaaaatggagtttacatataaaactaaaataactcaatcggttaaacctctcattttgtttaaactatgaacagtgtttcgtcatgatatttttaagctatcatcagcttcaactacaagaattttttaagctagatatacgtagctgcaacaaaatttagagttggagctatgtcaaacacgacaaactaaagtatttgtatgcttgttcctttttgtttgtcatttatttttgtgtgttattttaggatattcacaatgtgtcctctctctctctctctctctctctctatatatatatatatatatatatatatatatatatatatatatatatatatatatatatatatatatatatatatataggacactcatatggggcaccatggtttcaaatgcacaaaatcactcaaatttttcaaaaatttcaaattgtgagtatatacctagttataagaattcgattcatacctataactatcaacaaaacaactcaaatttaactttatttcacaatccatgattacatacctaactaattatatgtatggatgctatatacctagaatcaaaatctaacacaaaacaagttcaaattcagttcaaacttgctttcaactagttagtaaagtagttaatattaatacctaaataattgaaaaagtttcatgctcatttgaattgggtatatactcaatttcaacaatggtgcccgggcaccatggagcaccaaacaaatttactatatatatatatatatatatatatatatatatatatatatatatatatatatatatatatatatccccatttttggactaaaactatagagtatatttatttccatttacttttatttatcatttaggacattcacacggtattgatatgcccgtatgcaaatctagtcgtttacttttctatctgcgttgtgagattaaggattagtagtacatcttgcgtagtgccacaagctgatctctcaaacaggtccgatatatcttcattcatttttgtgtgttatttaggatactcacgcggtgtcctagctatatgcccctctggccattgctttttctaaccaaactatatttttaaggtttgattgaacctattccaaattaaacaaatttgtttggagttaggctgtgttcggcatctctggttcccaaccagaacagaacagtacgcacagaaaacggagcagtccattagcgcgtgattaattaagttttagtttttttttcaaaaattaattgatttgattttttagcaactttcatatagaaactttttttaaaaaacacatcgtttagtagttttagaagcgcgtgcataaaaacacgagggagaggggttgggaacttgagcaaagaacacagtcttaataccccacaatactggaacaacagatagcatgatgactacacagtacacatatgctctttgcggtggtttggtaaaacactaataagtcatctatcccggtgagggaatggaacacaattacgttgcagtattcccttcgttctaaaataggtatagttttatactgtttatatccaacgtttgaccgtttgttttatttgaaattttttatgattattatatttgttgatattacatgataaaatatgaacaatactttatgtgtgatttttatttatttttttcataaacttttttaaataagacggacggttaaatattggacacggatacctactgcagtttcgtttattttaggacggaggtagcagtggatggccaagcgtgtgcttaagaaaagacggcaacaaacgcactaataagttccgatcgttgaatgttgaaaactaaggatgtatagtgtttgatactagaatgatagaaactactagaaaagaaatagaaatagaattggtgggcccatatcggcatcctatataaagccccctgagcacggcgtatccccctcgcaccaaccaaacaagctgttttttgtcaaccattcctctgctcctcccccggcctggggagtggagcgccaaatcgtccatcgcgagctagcctccgaaccggagacaagaagcgccccacgcccacgcgcgtgcgtttccgagccgaaacgtaacgcccccgcgcggcgcgttgcgttgttccacctgtttcggctatgtcgtcgccgcgccgagatggccgtggcgcggtcgacgacctcacggcgtccttgctccacaagggggatggtggggaggcggtgttcgtcgtcgtcgttgttcccccggtggcggaggaggaggagccgccgccggtgctcacgtgcaagccgcctggacggtttgctagagcggtgaaggaagcctggtccgtcccgttcccgatgatgccgtccatgtcggccggcgcggcgggcgccgaggcccggtcgatactggggctcgcgctgcccatgatcttgacagggctgctgctttacctccggtcaatgatttcgatgcttttcctcggccgcctaggtggtctggcgctcgctggcgggtccctcgccatcggcttcgctaacataacaggatattcagtgctgtctggcctcgccatgggtatggagcccatctgcgggcaagccttcggcgcgggccattacgatctcctcggcgtcaccatgcagcgcaccgtgctcctgctcgtcgcggcctccgtccccatcgccgggctgtgggtgcacatgcggcctctgctcctgctctgcggtcaggacgccgccatcgcggcggtcgccgagacctacattcttgcttctcttccggacctcctcctgcaggcgttcctccaccccgtacgcatctacctccggacgcagtccataaaccttccgctcaccgtgtgcgcggcgctcgccattgctctccaccttccgatcaactacgtggccgtctctgtcctcgggctcggcatcaaaggggtggcattggcctctgttctggccaatctaaacctcgtcctcttcctctttggctacatatggttcaagggcgtgcacaagcgcaccggcggcttcgcgctctcagcggattgcttacgcggctggggcgagctcgtcagcctcgccctgccgagctgcatcagcgtctgcctcgagtggtggtggtacgagatcatgatcctcctgtgcgggctgctcgcgaacccgcaggccaccgtggcgtccatgggcatcctgatccagaccacgtcgctcatctacatcttcccttcctcgctcggcttcggcgtctccacccgcgtcagcaacgagctcggcgcgaaccggcccgagcgcgcctgccgagccgcgacggtgggcctcatgctcgggttcgcgttcggcggcgtggcgtccgcgttcgcgtgccacgtgcgcggcgcgtgggcgaccatgttcaccgccgacccggcgatcgtcgcgctcaccgcgtccgtgctgccgatcctgggcgcctgcgagctcggcaactgcccccagacgaccgggtgcggcgtgctccgcggcagcgcgcggcccaaggacgccgcaagcatcaacctccggtcgttctacctcgtcggcacaccggtggcgctcatcctcgcgttctggtaccactacgacttcaggggactctggctcggcctcctcgcggcgcaggcgacctgcgtggtgcgcatgctcctcgtgatcggggagacggactggaccgcggaggccaagcgcgcgcagcagctcaccggagcggcggacatcaaggattgcggcggcaaaggcgatcacgtcgcagtgattgagcaaccagatgagcagtgttgacaagctacgggcgttcaacattgccgtcggctcctcggcttaccttttttttttccatatttttggcgggagagaaaccagaggctaacatatgacaattttgttaccaattggtaatctgtaaagattcttttctgatggttattacagaaggtgaaaaaattcaaaggaaatatcaaagattttttcctctgacaaaaagtcaccctaacagtaacatttcgctaaagctgccatccctggtcaaagtgtgcattggcggcttatgtttgcagataaacgtacagtttgaaatttttgaagtgaaaacaagtagaggctcctctggctcgatcgaacgtatgaactctacagtaatctcaatttccatgaaaatcccgcaaaattcctccataccaaagggggcataaggagcaaaatgggattgatttacctttgatacgtcagacaagctattaaacagaaatctaaccgaggcaagaaaattactattgcatcatctccatagaagacattatgaacgagcttcaattatttggactctggggccataaatttgacatgacaagcaggaatataacattctcataggtaaaaccatacgctcgagtcgaaatcaatcagatttcaataagaaggtttcgtggttctcgataaccaatggagattccattgcatgcctatgtgaataagcaatgatccgactgatatatacactagtactatatttaaacgtcaaagaaccaacgatctgctagtaatggccaacttggaattttcgtacgcttaaactatcagagcaaagcacggccatggaacaagcaaagcaactagtaattttctgaacactggaatgcttcaaacagtggcactgcgatgatccaatcaacgtgtaactgcgtcccgcgagtgaggctcaaacatggcctgtctggatccggagggctatttaatagcccttcggaaacttgttatttataagtattaaacgtagattactgacaaaacacatttcataatccctaggctattttgcgagacgaatctaacgaggtatattaatccataattagcggatgattactgtagcaaatcatggattaatatatctcgttagattcgtctcgcaaaatagcctagaggttatggaatgggttttgtcggtaatctacgtttaatactcctaaataacaagatttcggagggatatttaatgatgacttttacggtacaatatactggcagtatatactgtaagtatttacaaggatataataggaatttgctaaaaaaatgtaattgacattttaataatctattcttaggttcaatctctatctttaatttggcgctgtcgtgtgcatgattcaggtgagggagagatgagccaaggcggtgcaattagtcctctttggcggctggattcaccggcgcctgcttcctgttcatgcggccaatcgccgtctcccaccaccgtctcacgcgatctgtgcacacgaaaatgcatgcattaacttatgtactcttatgttcttgcaaatattctctgcaattttaatctgtagaatctgaccttaagatggcaatggtacagggagcgtccccagtagagctagggttcagtggcactgcaaaatgttaattgttccctataattgattagtactaaatcaccatgcttaattgattttgagcgttgttgcgacgtgcttgtggtggctgccacggcgagcgtcgactgtgtggctgccggcacaactccgccgcctagggtgaacgacgatgggaatggggaatcggatcgagcttgtatgttggaattaacgaaattgccaccacgaaataaaacaaaaagaccagaataccctttttagaattatactacaaatctaattaagtgggtaggtaatcaatctacactattggatcaattatactatcagtatattataccgtaaaatttctctatttaatagcctgaaggatccaaacaaggtcatgaacggaataagatgtatgcggctgctgcagcagcagctagctcctcacacatcccggcgaggagatgagattcctctgctcgctcccggtgttcggtcggagggcgcagctcaacgacgacggcacgaggcccaggtggatccgcctgtgccacgcataattataccggaggtcgtacaatgattccagtggctaactggtgggcgtgacggctatactatctgcaccggcaacggcacggctggcctatgcagtggagtagtattagaaaaaacagaaacggccatttttgcactcactgagccactaggcttctccggactccgagaagatatccactgtttggatgaccccaagagccagtataaaaatgtaaagtactggattactggtaatttatatggcagttgcttacctccaggttaatgcaacgcttaatgaaaattatgctcattatgtcctggtgtaaaacttgtcgtaaaaacgatgtatccgtataagtgtgggttagtagtagtagattttggggttggtatgcgatgagatctagctgtatcagttcgataagatgcgtgtttgcgtggaagcaatcgacacttgttgcttgaatcaacagtctatgttagtctcagtgtgacaaggatatactgtatctcagatgatatcgcagtttgtctactaatacataaatttctcatcttagccatcattacagctgaggctagaaggagctgtgctagcataaacggctggagagctgtagtcattatcatcttttggatgaaagcaattgcgtttaaatatcgacttggtcgcaaagcgaattcattactgtttccatttcttttcgttctctagcggaatcaaggatgtgacggggaaagaaaccaaagtggttaggattataaagtggggatacatcacgaggaaagggtgcagctgactgagtgaagtggacatgtagtagggtaacgagggcgcaagggatttttgttttgtgtagggtatataaacgcacttttttgttgtaaaagaagccttttcaatcatgtaggttcaatattgaagcagcagagatcgctgatttttctttgttggccaactccctgtcaagatccctatcaagacagggatactcggtgttattttcctcaggaaacgattcttgatccaagtttaaggccactctcgagctgaaagcgtccattcatatattcaattagaagtctaggacagttctaactcgccttgtactaaaaaaatgcacataaaccatattgtactatcataatcacatgcataatctcatggccctcaactcaaacatttttagctacacactgcaatttttttataaatagtgtcagaacccacgatataaagacacgattgatttcctctccctgcttccatcactctgtttaaaaacgcattatccttcatttgctacgtttctcactttctcttatttttaaagctaatctcgaccgactttcactagtggaactaacaggccacaatcttgcagatttggtagataatggagatcaatcagttgtcttctttacatgacactagcagtactgtattttttacgtcggtaagatcactaccgtatgattttcttggggaagaaaagaaggaaacaagtcaactggagccctctgcaatcatcatgctgcccttgattgccaagcaaagtgtcacacggtgatcaaacccaatcaatggctctgtaaagcgacagtgatccttcgatgctggacaatcgactttcgtctgaaaactggcagcaactgaaacagagttgcatttcgtccttgaactcgatacccccggccggccctgaagaccacgtacagaagacgacgccaacgcagtctgactctactctgcagtgtcacggtcacgtcctagctgcacgatcttgcatgaacccctccgacactcggttcacgtcacgtaggagtatctaacagttgtggaccggctgagtcgatcaagcaaccaacctgtgggagaggagtacatgcgagatacgcaatgccctcctggttctagacttctagtaaagtggagtgacgtgccagcccaacacgtgccagtctagatcaggaatgaactgcccgttgaaagtacaagcgaccgtccctgtcccggccgtcgcaaacacccgagggtcgtcgagacaattgggggattcttttgtcacacgcaccgcagcgtaggctagttgcggttcgggcgttggtcatgcacgcacgtacgtggctgacccggccgggccgggtgcgagcggggacgacctgggcgcgtgtccagtggtgggggagcagcgccaccggtggggcggcgaaaggtccaccgccccggggtgattcgccgtgtgcgtcgtgacgcatcgccgcccccccagcgcacgcggaccccggcgagacgtgggttgaacgcctagcaatccctggcaatcgcgcacgcgggcgcgggcggcggtggcgagtcgatctggccggcccgggcggtacgtcgccgatggatgggcggccagccgtaaaggccgcgtgcgccgtgccactcgatcggtgagtgagaccgagtcttttaattccagcggcgcaccgccccggctcagtgccccgccgctgctcgagtcgtgtccactagataagagtcaatagaccacggtgccacggtgccacgctgccagtgtgtcgttctactcgggtagtccggcaccagaaggatgatgtgacgtgcggtcgtgcgttcgtggcacatgcactcgcgtgcgtctctcgatcggttttaagctagtggcctggctcgagcgggccgctgcgctggcctaacacttcaacgtcgcagcagcttcacgaaatccatgacatatttgcttacgggacggcaaccacagaaagtctgaactacatatctatatggtgggcgtactcaaacgtatacataaaaaaatgtgactgagcgtatagaaatggatctgaaactgaaacccatcagggctcgtcaacagagtgtgctggctgtactgtttccaaaaaaaaaagtgtgctggctgcaggtagtagcggaagccggaagcaccgttttttgttgatcaaataatgcagttgacatgcggaaaacctacagtagggcaactgggacatgtgtttgcattttctggaagctgacttttggcatgtcaactcaagttgcagttaaatgtccgaatttaagccataatttaaggaccggtttgagatgtttatatcgttatgctttgtcttttcgaaactgcccggccgttgcccgttccctccgtctctgtttcatattataaatcgtttaactttattttagtcaaacttttttaaatttgactaagtttatagaaaaatatagtagtattttgaacgtaaaataaacatattatcaaaatatattcaatgttagatttaatgaaactaatttgatattttagatattgctaaatttttctataaacttgatcaaacttaataaagtttgaatagaaaaaaagtcaaacgacttataatatatatattatttaaacggagggaggagtagtatttgtagctggcagaggaagaactacgaacagaagagatggatggtacctctcttttgtctgatccgttatcctttctgaagatgctcgtcttctaggctggagaacatcaggctccgcgacaatcaggccttggataagctagtaattaatcacgccaatcagggcttcatcctaggactaggaaacaaacaatgtatctgttactgcaagtatagaagtttactcttacatcttaacatgaaaataaatcaggacagcaacccttctcattaatggaatcatggcaggtggcaagttagctattggtggtgggcataattagtttagtcaagtagattacaaatgactcttatgctaataatttctttattggagattgatcaagtatcagaagtcatctagccagattaaaaccacagaatctttcacatcaatattgtaggagcagttttataccaaaccaaagcggataagacagattctctaggctttagtaagtaatatacaattaatcaaatttgcagtttctggctatgtgtattccatgatgtacatttacctccaaatgcatgtccagagcatatacactagcagtacaagagaaccaaatttacacacataaacggatggagtggccgaaagacaataaatctttaacaagaactgttcgattaactcctgaaatacatggcggaaaggatggaggaaataatgcaacgaagtcagcagactttaacagaccatcagtgcaagccaatcacattaaatcaagtcaaaacaccagaaacatagcacaaacactgaaaaggtatacagtgaaaatgcttcattcgccttttacacggacgtgtagtagatttcaactgcttgatggatacaaaggcggaatactatcaaacatccttcagccaagattgaacatgtaatacatgagcattttaccatttatacataaatatatattttctgaacataggttatgttaagtagcttgataaaaggagtaagcacttacagaacatagaagtacgaccagaaaaaaaaacaacctattttaaaaatatatagtacttcagcgaaatagaataatttcaataatgagtcccctcagaaagaaaagaccaggatagaaatctggtgagcacaaagaactgcaaatgtggggtataggagtacatgataaaaaaataaaaagaataatttagtggtaccatttgcaaatataattttcatcatgagctgtttaagtaacaactggatttatctttttttttcctcagcaatgagcctgttgactatagatgacattataagtaactacatactatatatgagttttatattcattgtcaatgcattaagaaaccacaacatgcaatacacaaatgacagctacagtcaactacatttatattgcaaaaattgaaaaatgtcaaacataaaaaggaagggattgggaggattcaagttgacctataattcttttgagttgttcaagttgaccacttttagggaatgcagctttagccaatggtattcaggtcaaactgatgcatcagcttcttacttaagttatcagtacattgtatccttattgaagacaagcaggagagttcaatcgagaaataagttgatcaacatctgagcagcactaagggtcagatgactgatagaataatataatggacaggatattttaaggcaaaatactataatcagtctggggtgatccaatgttcaaatatctgtgttggtctcaaaactgcaacacaagaccaggccgtcggggacaagagtacaaacaatgtacaatgtcctattttctgaacttcttactgacaaagggaacaaaggaagggcctttatcaattccaaattaaacgtcttgcatttatccgtggtcactttcattcagatgcaatttcagccattactatccctgaaaacagatcttctgtcaagatgctcaagaagatgctactgttttctaaagatcaaaggtactatcaaaagtacatataattggtggtggtctgtgattacagaccgtcacaggagaacggcctggcccaacatcaaatttggcccaaatatcacgtgccaaccaaaatcaacagcataataggttttccgagtgacggtgagatgcatcacacacattccacagcatcagtaggattatacacccatcatttgcagtgcacactacagcagatgcattccacagaaataaggtagattcattgttaattgtgccgtaaaccttgcagttgattgataggagttggatcaataggaaccaatgcaacaaaattagctacatcaacttcaattaaaagtcagggacgtttgtcatgttttacgaaaacttaaggaacaaattagcctgaacagaaaacttatcatttaaagcattttatttgaatctattctgagatcgaaaaacatgtagtataacagtatgacagaagtcggccaaaaatctcttgtatacagattacagagtattgcattctacggtactaattgcatccactattcgataaagaagttttaaaagcacgatctttcctacggaagaggtaacaccagtctaaaaatcaaccgaacattcagcaagcaagcaagatatcgcaatcaggagttcaggactaagaccagatcagattgctcgtgcaaagaggcatttcaacaagcacctgccgtgcgtgcccaatcagataagaaccagcaggtgccaggtagagaagctgaccttactatctcgccgttggccaaaagcaaatctgccctttgaagcaaccggctgacggagggaggcctgccgcctgcctgatcgctgatcggtgttggattttaggcggagtgacaagtacggagtatataacctgacctaattcgtgtacatgttcatctgcggtgcctgcctctctgggtttgtaagctgcgggcctgcggctgtcctatgggccgtatgctgatcgtccgatatactcaaatgggccgtcgcctcgtagtaggagccccggatgatgggccgagctcgaacgtgtcaataaaacgagactactgttcatacgcaaaatgagtacgcagtctcaagtctcaacgagttgtataccgggagtccgagcctgaaaaatacaagttgttttcaggccactatcaagaacgttccgtgcggtacgatgccgtgcattaggtaaggtttgcgcggtgaagaaggccgacatgccatctcactgacgtgaacgcctcctcgcccgcgggttgttcacgaacacgagtactagtgcgtagtactagccgtgtaccacccacctcggcactcgcaggctcgcagcgcatggtaaccatcttttatttgtgttcccgaagaaaggtggtaagtagaagtaccttgttttttttaatttcaagatatgtaagtacacgagaaagtccgtatcattcacgtagcatgcagaccacgcagcatcgtttgatcaggcgtggcgtggcgactgccaaatcttggactgttccgcggcgcgcacctgctcccttcccacgctcccacgccgccgcggggggccccgcgcgctctcctcccctccactattcaaatccgcatctactagccacggccgccgacccagcccttcccgagtgacagctggacccccggtgcgggtgcccacacgtcatggagagggcgaggcagacggcatggagtgccgagtgcgaggtggaggcggaggagcagatctgccgactgccgaggcggggtagtagtagtagggcagctagtactagctactagacgcaaggcaggcatcacgcaagtcacggggagatacttctcattctcgcgacgactcgtgctgactgcttcgtcaccaactcaacggattccatttccgccgcccccgcgccgcatcattcgttgccagcgccccacgcaaatcccaaatcccaaaccccgcggcgatggccaccgtcgcccagcccgaccccagcagcagcagccgccgcaccgccgctcttatacgccgcagcggcagcgtcctgctcgagcaaccgtattattagccacggccccgcacgcccgcttgatccgcctgctgcgcgcgcgcgagttttttttttttccttttttcctgttggtgttgcgcggtgggcgagaggtgttggggggaagatgctggggtcggggctgaatctggtgaccacggtgatcggcttcgggatgagtgccaccttcatcgtcttcgtctgcgcgcgcctcatctgcggccgcgccgcgcgggccgacgccgaggccgacgccgccgagggcagggtcgcggccgcgcgggccatggcggctggccccgcgccgttcgacttcgacgtcgagttccgggccacggatctcgaccgcacggtaagatttctgtgctctactccggtaataacatcatctagcgtttagctggttggcgtgggatggctctgtgcgcattgctgcgtggtgaattgttgatgctgtgccgcttgaattgctttttaacatgactccataagcgatgggtccaatagttcgcaatttctacgggtatggcaaccagttcacggaaatgacaaatcgccacgcctcacactgatttaatttgttccagcagtggaaaatctaaaaaaaaaaacgaatggttcctccatttacttccaattatctggatacaaattagacaacaattcaaggcttcaagcttgtttatgaatggctccttcatttgatttcagttataaccagggtttaatctttcggtttggacgtttctatcagagggtgctgatatactgaaattgcagaaatttcgttctgaaattttgaagacattttagtcaaagttgaataaaataattccaaattcacaaaaaaaaattcggccaaaataatatcattgggggggggggtccgatatgatcgaaatttcgttccggaattttgaaccctggatatacctggatacaaattagacaacaattcaatgcttcaaacttgtttagttgtgcatgacgtgcaaattctgttatatagcaattgagcaataaatgcacatcacactttaactcaggattgatgcatactatttgcaatgcaagctattctttctaacagaaagatagatgggcattgcctttttaaaacctaactaagcttcaaatgtggaaaaaatgcttgctccaaatgcgtctgaaaaatcctagtaacaatgaggtgataaaatggagaaggaaattatgtgtctgaattgagcaaggagtgataacttgggaaccaaaagtactactaatcctactaataaaaactattaacttgagtaaacatcgtaataaaaaagattttgtagttatattaaaaagagagagagaagacatggtcttgttccaaaataaatgcagttcgtgttggccatatagttatgccaaagatttcctttgctaatcaaaccagccatagaaatttcaagttacttaacataatgtaaacttgttttttcttctgatgtatgtctaatgcttggtcacaatataatcgagttgtcatagtgtattttttctcttggttgttgtgagagtgtctgaattactctcatcaccaatttatgtcaatatcacattattttctataactcaatagaagattagacatctgcgctgtctgtttcaactgtgaatatgacatgataggttaatatgtaatatatcacttcacaaacatgcaagttcaaattcgacttctacaagttataacaaaaagtcaaaaaataacaaatttgactgtgaatatacgtatactagttagagtttgatttgttatttttgttacaacttgtagaagtcgaatttgaacttgcatgtttgtgaagtgatatattacatattaacctatcttgtgaatttttttggaattttttcataatcatttaggtggcatgcaagaaacgggtggacgtccacccaagagattagaatccatcctccatatataaagcatcttttatattgcttacggacaacctagaggcctaggaccagattcttgccagttttgtgcccattgatcacctttacagacatgctaacttccacttgttcatgacaataatattttcagtgagtagccttttgggaagataaacttctaatctattgagagttttgaattcttcatgcaaactatcgtagtattgtatatatattgataatataacaatattactgaaaagttacacaacaattaccagattccaaattccaaatgtaatggcacactaaggtgctcctgttgtatcttttgatgggctcccttttgtccttatttacttgttgcatcattcctaattagaaaatgatgcttgaactgctaaaatcagatatttgtaatactaaatggaaaaccactgtgctaattaggtatgtgcttgtgttcggaaattaacttggtcattcctttttttttcaatagattgagcatacccgtagtggattggaaccttttgttgttgctgcaattcctacaatgaagtacagctacgaggccttccaatcaaaagatgatgcccagtaagtgtactgtatactgtagagctacttacgtgcttccatcttttggtctcctgtctatcatgtttgcctgttctggattggcagcaaacttcatgaggtagtatctgcaactgtccagttacctgcatcaaactttctttgctctgctggaatgcctgtacagtttttcttttcgacaattgtcagtgaaattcactgaaaagaatattcaagaagtttgttagtgtgcataatatgttaatattagatgaacaattgcaaacaactccattccaaaaatgatgatccgatgctgatagcctgaaaaatatttcatatttaatattggtgatctcatgtgttgtgaagcatgtggtacagctggctaagaaactgaaatatgttggaacaactcaccagccagactagctctctagttgtgatttacaagctatatagcatactagtgcttttgggaacaagaattgcatgagctatctgttgttattcttttatcccatttttgaatggaggaaaggaaaacaagcagacctgataattgaacattgacccatgcttgctaatctaacatgactattgaagatagtgagcaatcaatcaaataaaactactggtagcctaaaaaaaacaccggtgaaattgatacagataatcatcagagtttttgtgtgtatgtgtgcttgtgtttcatgatgtatcggatatgcataacatgaattatgtgtggaaaagagggcagttgaatagaattatatttttgattaaaaacggtctctagcacttatttggtgaacagaatagcactggacctgcatatgcttcgctgtcttttcttttttatcttggatctgtgtcttcatggcaagaagttactttcttgtccaacagatatcatttgtaaccgagtcttccctgccaaaaaatggaataatcaagagaaaataccattttgtgttaggatttatattactgggctgactatcatgtcaaaaataatattactggttgatgattatggttccttatttgtgctgcgacatgctcggagaaagttaccatcttgcagaaataatgttataagctatttgaccttttttttttgtttaacaggtgctccatatgtttaggtgaatacaatgagaaagagattctgcgcatcatgcccaaatgccgtcataattttcatctttcctgtatagatgtatggttacaaaagcaaactacttgtccgatatgccggatctcattgaaggacctacccagtggaaaacctgccgagtcccctgtccgtagtctccctcaactattcagccaccctgaaagctcagtgagtcgatcacctcattggatacttcctatccatcgtgatcgtactggaggtagagaaagcagcccggcttcacaagaaacagtagaggtggtcattgaaatccaacaagaaatgcactgaggacatggatgtatagaggcgagatatcgatagaagttgatgaaactattttgtttttcggttgagcaacaaagatatcttctattgcagaaacgccgtgcgttcttccagcagcagggcagcacgtacacggctttggcacagaattgcaaggaatttgtttacgacaggactggattttaggcattctttgtacatttgagggtgtagattagcgggttgccttttgcccctctgttcattttttatgtgtccttgatgtatagtgtaaaaggaagcattaacaatactgatcagattcggggccgcgaaaatatttgtagcagcgccgttgttcagatatcatcagtttatcactgctatcttcagcttgaacagggcgtcttaggccgagtttagtttcaaacaagtttttcaaacctccaattttttcatcacatcaaaactttcctacacacataaacttttctgttacatattttcaatttcaaccaaacttttaattttgacgtgaactaaacatacccttaaggactttacgatccattttctagtttcaatgcgttacaggataaatcacatcctgtgataattcactcccctcctttcccccactccgaacgagagcattcatgggtgttacttctgcatcaacagctgtgacaacgctaagttttcaacgactcgaggagggtgcccctgtttctgcactgtgaacgactgtaaaggacacatcgtcgtccacgaccggttgtttcgacacctcattgtcgcagctctacagtgtcagctcagcctggcaatggttcaacgctcggcgtagtgtagtactggtaagtagtaataaccgtgttgttacacgcaagaaagggagaaaaaaaaaagaggaaagctgcagctgtcagggtaaggctgcgagctgggactagttaactactgtggcgacgctgcccggccgcccagggtggcggcggacgagcgcgtcagatgcgggcgtgcggcttgtagccgtcgcgaggcagctggtgcctggtagccgcggagcggagggagctatccgccggcgcccaaagtcgcgcagggtccacgcggctttgcttatggcgtgccgagaatccaccggtttttgacatttgccaagccaccgccttttgtagatgtgtgtattttgagcccgatattttgagccgacttacactgcagcagggcacgtttgtgttcttgttttgagccgacctatttaatcagggagccccagtgtgcgaactgtggatcaccgtgaccaaatttacgactccatctgataccaccagtgtgacgacgggtcggagtcgcgagggagaggccctcctggcgccccaacgacgtctaggcctggatgggctggcccagggtgcactgtgcttgcgtcgtgtacatggaacggataagagaaggtgacccagcgtgagaggtgctggcccggacaaagcttttttatatgcccgtggattcgttcgtgctctaacttttcaggtttcggactaggggaaagggatttttatttttttaataatgaaacgaatcccatcctttgtttcaagaagctacactaacttgttacgaacattattcggaaagcgacttaaaattctaaatatgagaaagaaaaacactaataattccaaatatgagaaaaatgatttttattagctttcattgaggttgttgtttttctcgattacacaaaagacacgtatacaccgcaacacaaattatgcatatacgcatgcatgagtccttcccaaagaagacgacaataattattcaaagaaaaaaaaagaagacgataataggtggtaaactggtcacctactaagatcgcatcacacatacatccactagtgcacattggaggacatagacttgtggtaaaatacattgagtttattgtagtcctatctaataatctaaagctggttcttttgctagctttcaattggtccacgtggcgcctcttactattgaagaaaaatcataaatttatactagagaaaaaatacctaacaatcatatgtgagggaaaatctagagaaaaatatcactagggattccacagccttccaaaattattttctctttccaatcacacgaacttatactcctttacattctataaatataccacgtctactctgtactactattacatatggatttcagaggaatccaaaactatctctgttttcaatcacacgaacttgtactcctttatcttctataaatataccacgcctactcggtactcctcctataactctagaattatatagtaaagtcaaaattattaagcaaaaaaataaatctaaaacaatgaatttacgttaattttccttcgttagatataccacgcatactcgatactagactcctataactctagaatatacagtaaaaccaaaattaatatgaaaaatatccaaaacattaaaaaagattaaaaatttaatagtttgttcattaaatctttagttatgacataagatgcatctgtattgacatcatgcacccattttacagcacagacaattatcaacctgtgtaccagaaaataaaacatttaaaaaatcattctaaataaaatgagattttttttttcgagtgaaaaatatggatatatgatgatatataatatattcacgaaataaaattgcaatcctaaaaggaaaaaaatgcctgaaattccataaggtcggggttacatataaggttggtaacatagctaaaaattgaaagagaaaactaaatacgacgtaagatccggtttttctagactaaacgttgtacattccattccgtaacagaaaataaatcccacgatctggtttttctagatggccataatcagctcgccgcatgtggctcgcgaatgcttaacaaactcgtatataggaaatacgcggtcgacgatagcgttgaggaagatgaacacgctattccatgaagggttgaacaggaaatacgcggtcgacgatagcgttgaggaagatgaacatgctattccatgaagggttgagcagctacttcacgcatgagtattatctgaacttaattaccttgcactcaaaacctaattccaacttccttgcgtcatcagaatgcccttgtttattaatgtagacggaataagacgagattgataaggataatgtcggaactgacgacgacacacctaaattttatgacaagtcgggtgtctgaattttagcttttttcagatgatggttatatatatttttgtactaaaactgtagattgcattcattgcaatttctgtaaccgcaatctacaattttttttggtaccgtgactaaaaaaacagttatattaaatcataaatccaataaaatattatttgtgttggcacgaaaacaattaacagtttacattttttatagaaaaatacatgacaaaaaaaataatatgctatgacacaaagaaaataataaatcataaaaataacaatttacttgttttagttaaaaataaaaccctgcgtacccacgtgtttacaatattcgtggacagtaagatttcaatcatgatctacacataattcaccataatagcttttattgcttccacataattcaccataacagcttttattgcttcccttattgaggttttgctagatttttgtatttcatttgtctccaactccttcaattcaagagcgcactaattattcggtaagagcatctctagtagtaacccctactctagagtccctaaagtttaaatgggggctgcccccaatgctttaagaccctaaatatgcctttatgtctagcagtagtctccatatcttagcccctatttcttttttctcttttattttagtatagaatttatatttatatctagtttaacacacaataattcaaacatagataactctagcgcgtagaattcaaccatattgaaatttgcaatttcaaacaccacgattcaaatttgaattcaaaattttcaaacatgaaaatgatatatcctacaagcaaatattgaacataacccatacatgatagaaaatgcaacgaaacaaactaccgagcaccatgaagcgcccacaaatgttccacaagatcatctcgaagttgctcatgtaccttatacacgcaacaactatggttgctgcgggtatttttcttatagcttgacttcttcctcttttcatatccctacctttgataatgagtttcatttctttaataggtacactaacacttttcttaggagccactttagctcttgctcagagagatattaaaagaagcttagcctattctacaatgtctcaattgggttatatgatgttagctctaggtataggttcttatcaagcagctttattccatttgatcactcatgcttattcgaaagctttattattcttgggatccggatctgttattcattcaatggaacctcttgttggatattcaccagataaaagtcagaatatggttcttatgggtggtttaagaaaatacattccaattacaagaacttgttttttatggggtaccctttctctttgtggtattccacctcttgcttgcttctggtccaaagatgaaatccttagtggtcttcaatttctttatgtatctttagaaacttctctaacataggtttattacgccgttggtattcctcctttctcaacacctcactgtcctcctgatcatagtcgtagtctacatcttcatctcgctcattgtcaatgatcatgttgtgcatgattacacaagctgtcattatgtaccatagggtctctgtatcccaaaatctagcaggacccctcaccattgcaaagcaggcttgtagaacaccaaatgctctttcaacatcctttctcactccttcttgaacttttgcataatgtattctcttgttaccttgtggattggaaatggtcttcacaaaagtggcccaagaagggtatacgccatcagcaagatagtaacccatagtgtatttctttccattcaccataaactccagctcagaagctgtccctgatgtaagcctttgaaagagtggtgatctctgtagtacattgatataattaagagaacctggtaatccaaagaaggaatgccaaatccataaatctttagatgcaacagattcaagaatcatggttggcccatccacatgccctgagtattgtcctttccagcctgttgggcaattcttccacctccaatgcatacagtcaatacaacctagcatccctgggaacccccttggagtgtttatagccatcaaccttgcagtgtcctcagcagttggtgccctcaagtattgatcagcaaacacatctaccacagccttgacaaagtgcttgaaagcttctatcatggtgctctctgaaattctcacgacttcatcaagactatcggctagaatatcatatgcaagcatgcaaattgcaccatacaccttctacaatgcagtagcaccgagaagacccactgcattcggtctctgcctgaagtagtcatcataagcctccacactagccacgatgcgcaagaagagctcctttgacattctgaacctcctcctaaataattttgcattatatacaggaggatctgcaaaataatcagccactatgcgcaaattgccagcaaacctgtccctataaattatctcacgacctgggaccgaaccacgacgctttcttttggtcctcttatgttctatgtccgtaagaagagcagctgcaatgtaatagtcatcatcgtcagacaactcctcttgatcccaccattcggtaatgagatcgtcgtcgtcgtcgtcgtcaccgtcgtagaagttcatgtaaaaaacactgccatcacaagatcataaaattaataagaaaatttagagcatatgcacacgtatccaactacacacatatacagtatgcaacattcaatctataaaaagcagtgcatatatatatatatatatatatatatatatatatatatatatatatatgtggttataatcgatccattgcaacaattgtacagtgctacaaaatgcagtgctactataagtacagtgatatatactagttgagaatttagattgtcctggccgacagtccactacaattcttcaaaaaaatattaaaaacaaatcagtctccaccagaaccatctatcaccacgtccacaggtagtcaagaacgagtttattcagaaaaattgactggtactctactactcatatctcctctactactcaaccaccacaccacatgaccaacttcaagttttttccagaaaaatcaatggggcagcggcggtgtacaggctcccgccagtgaaatctgaaaatacgatcgggcagaggccagcgtgggggcagacaccgtgcaagtgggtgatgtgcgcgtcggcagtctcagagggcacgcgacggccggcgtatggccaggcggatggcgggaggtcggtgaccgcgcgtgcgcatggaccgccgccgccggccttgtggacgacgggcaaacaaatgtatggaaaagtcttaccttttgggacaggcttggcagagatgctgggagttcgtcggtggtcgccggagaagatccctcgtcgcagccacgcgggaataacacgaaaaagcgcgaagcaaaattgttatccgcgccaaaaaaagaacgatgggggccgtgctcggagcccccaggactgaggccttggggggaggatttgagggccttctcattttgggggctgtagtagggaccctgctggatctagttttttttatctttaactctcaaaatttgaataggggctggatttaagatccctgatggagatactctaatggcattttcagtgctctacgttacattcgacgtactcgtggtgataaataacatgatacatgtttttttttcatcacaataaattaaaaagagtagataaatgtaagaagctgtctaattgcgcgtaacataaccacgtcacacatacaaattatacttacgaagagacaatcaaaatagtgtaggatcgatcaaggcgattgtacatcacaaaatcatatatacaatttaataatacgagaagatagagtgggtgaaaaaaatcattgtttagccccattatgtagaaatgccacctgtgtatatagttgttattgttaggtgtggattcctacatatttttaagtgtttaattaaccccgtttgcatcctacatgcaaatgggccaatttgacactgtgcagcaaccctactactacaggattttagatctgcttatagctggggttttattattatatattaaaatgttgttccagagcaattttccacgtacctagcaaactagctaatatgaaatgcgctgaaggattctcgagaaaaagggtaattcgcagtaggaatcaacggtaagacatgtggaatgctaattaacaacaaacaccatggaaaatttgaaagaaattaagaaagttctatgtgcacatatatcttctttttgtaattataataactaatagatttttcaatgaaattttgcatatatttgtgaaatattatttacattgatatacaaatcctgggcagtattgctcaggcaaaatttgttacaagacactcaaagtttatagtatttgatattagacacctaaagaacgtgtatcttctcgtggatactgcaaaaaaatggtaattagcagctggacatccgcctcattattttattattttcggtggaaacggagagagaaacatttgttaaagacaagtttgcccatggacccacttgtcaatccctcttatctctttctctgttcatcttcttcctcctgtggcttcggatggggcagtggcgaagtgggcgccgccactgcagcagcagctagagcatggggcggcgcgctgccgctaggagtcctccccggggctccgcttcggatgaggcagcaacgaagtgggcgctgccgccgttggccaaatcctggcgcggtacgcgtgccccgtccgccatttcatccactggtggatcgacatggatggctcattttttcattttttcccccttttgagatcccctcttctgtctttcctctccgtccttgacctcgcaaagagcagttgtgcgagcgaaatcaggggcatacagcatacctgctccccttggggcccttcctactctgctcgcactcgccaaggggtagcgaatcagcgccgttttccggctcgcacacggcttggcttggcattgctgctgctgcaggccaacggggacatctgctacatggggctagcatgtacctggatgccatcgtgctgcccttgccagatggagccgttggtctgctgtggcatgtcagtgtgagaggaaaagaaagaaagaagaagagaagcaggaagaagaacagtttccaggggtattttggtactttcaacgctctttctctctctccgttttcaccgaaaataataaaataatgaggcgggtgtccaacagctaattaccacatttttacagtgttcatgagaagatacacgttttttgggtgtctcacagcaaatgccacaaactttgagcgtcctgtagcaaattttgccaattgcttatgtgtaaacacatctatatttgtatatatatataccatatagctatattgatcaatcttcagcataataatttgaatcacacatctccatgttttaatgatgtatatcgatctttctcttttatccaactaacgtggtaactcctagatattttgctacgttctaataatataacatatactcattctctcctagtcctagtaattaagggtattttagtttcaacactatcttaaggactacttcctccatttcacaatgtaagtcattctaacatttcccacattcatatttcccacattcatattaatgttaatgaatcgagacatatatgaatgtgggaaatatgaatgtggaaaatgctagaatgacttacatcgtgaaacggagggggtatatctaattttgactgttaattatgctaccaagcctcgatctccctctgttttcacataatctcccatgactaaaacaaaagatgaaggaaaaagtgcaccggaggtccctgtacttgtcatcgagatacgaaaacgtcctcgaaccgcaaaaccagatatacggggtcccttagctatacaaaaccggtcacccgaggttcttcggtggttttgaccctggttttggtctacgtggcggctgagccagcgtgggccccacatgtcagcatgccacatcatcactccttctctctctttcccctcctctccctttctcctctctctctctcttcacttttctcctgcaagccggccggcggatggggaggagatcgtcggtgcgacgagttggcggcggcagctgcgacacgggagcaggccaccgcgccgggtcagattcttgcactggccaaggctgcggcggcgggggacgtggagagtaggacggcacggttcgaggagatgctgcacgtgccattagaggagcgggaccgcgtctagcggcgtcgcagttcgaggagatactggtcgccacgcgtgcccgtgctcaaggacccgccgcctccgcctccgacaggccgacgctgacgccggcctccccgcgcctccccaccacggcgccggccacccgcaagcgctgtgctcaaggacccgccgcgacgaggtcacatcctcctctctcccctccctcttcctccagatccgctcgacgctgttgacgagcgtgacaggcggcggatcgggcaacatctcggcgagctcgtcacgggtggcaacacgcgccaagggtccatgtcggcctcatcggtgacgcgcgcgactgattcgtcgaggtaggccaccccattctagacccgtgcctctgtcggcggcggcgacgaggttggggaaatgacgagtcttcatctttgccgcctccaccgagatctccggcgtctctgtgcgcgagcatggtgagggctaagaccggcgacggccaacctcctactcccgacggcggcggcggcaccttttgcacgcaccatgactggcgagtgggcctagacatttgcaacgtcagcgaaaaaaaatgtggagagaagagaggaagagagatggtgttgacgtggcatgttgacatgtggggcccacgtgggtcccatgctgactcaaccgccacatagaccaaaaccagggtcaaaaccaccgaaggacctcgggtgaccggttttttatagttaagggaccccttatatctggttttgcagttcaatgatgttttcgtatctcggtgacaagttcagggacttccggtgcactttttccaaagatgaatcccaaggtaaactaatggttcttaattttttgtattgtaacgaagatttgaaccactttttccgtatggtgggtcctattaacctggaatgacagtgatttcaaggaatatttgaatcgccttttctttgatcaagtgacaggtcttgttaatctatggtgaaagcgaagttaaggaagagtttgagcaccttttcttgatcaagagatgatataataatgataataatatatataggactatactaatttagggtacggtgtgatgtgccatatagatttcaagcaacgatttagcaccttttgtctatgcttcgatcgatctgtcgcgaataaacaccgacttaattttttacattttactaacgctctaatatatagtgctaaattacctgaaaatcaaagactcgatcgaactgctatcttgcaactactagcaacatgtgtaccccctagctttggtagtactcctatattaataagtagattgtgggcataacacacgcatgtctgtcgctgttggtgacgtgctaattgtcagatactgtactagctacacggatattgatacgccaacgcaccgtagtaccgtacgtcacgtggtcaaaaccacacccaacgcatacaacgtagtacaatacgctgcgtggatgcagcgcgcgaccgagcaataggccgggacgcgtcgtgatctcgtgtgcgcctgtgtggccattcgaattggaagtcgtcgaggaaggcatctgtggcaggtatgggcgaggagccaaagaccgtgacaaatgcaccgacctgcatgcgcatgccgatgatacgcgcgcgcgtgcggcggcggcgctggcggcggagtacgtgatctcggctgatcgctcgggttaattgggtggccggcgcggcgttccttcgtaccaaagcaaatcgattcccaccgcaactttggctcgggcgctgcacatacagcatgttacggggtacgtggctcgctcaagtatatattacgtgtacgtgtatttgcggataatgtcgcatgcacctggttagctagctagttgtatttttacacgtacgtgtaatttgtaaatgtagttcatagtatatattctatctctgctttttcttcttagtcaccattgactatggcacgtagtaacgtaattaattaacttcttttatgtttcacagggagatatatacttatactttctagtgtaaaatttaataactttaagtactaagcacctcgaaacactgatggagaaaccggttgggaactccctttagtcttggttttccaaccgggagtaaggatccgggactaaagatggtggacatctttagtcccggttggtaaggagatctttagtcccggttgatgttaccaaccgggactaaagagacaatagcggtagtatcagatggtccctttttctttttttctttttttcctttttattttctcccgaatcaagtaggcaaatccccaaatcaatccccaaatcaaactaacatcccaaattcacatcaccaaattcatatcacaaatcataaagttacttatacacacaaattaaatacatcacaatatcctaagaaattactcaaatatatcacagatccaaacaatgaatcacaaatttgtaacttctcagtcaaatacgtctcagtgaatcatcacaatttttttttaaaaaaagaatgccgctgctgccgccggtcgccacgaccgccgggcgcggccccgtcgcctgccgccaggcgcggcccccccggccttcgccccgccacccgccgccctccgccgggcgccgccccgccgcccgccacagctgccgccgccggccggcccgccagatgggaaggggaggaggggggaggaggaagggaaggagttggagaagaggggatgaggaagagagttagagaggatagatctgaggagagggggtgagattcgatctgtctaagttgtaactgtggaggagaggataagtgatagggattatatactatgtgttttattttagtcccggtttttagtaccaaccgtgactaaagtggtgatatttagtcccagttattaacactgaccaggactaaagattctcggcccccaatttttataaccgggactaaaaacaatctttagtcctggttctttttggatccgggactattgtggattttgccggaccgaccaaagatggtttctccaccagtgaaatactttctcaagaaccaaaaactatccctatctaagtcaccaaaatgtcaaggcatataaacaaaagaattttccagcagatggaaccctaccaagaataaagatgagggaaggcttttgaccctagctaggatggagcacatatctaacctgacactcctaagtataatattgtactattatgtgtataaacttttttttattaataaattcattagcacaatattgacaggtgcgagatccagtcacaacgacgacggtgggagctagatccggtcacagcgacgatggtgcccgttgctcccctcctgagagctctcaaggcggctggatccggcggtccacttcacgtccagatctagtggccgagcacaaagaggcgaaggaggatcacgacatgaggatgaggtgaggagcacaatgtgacaacaacaatgacacaacctcctcctcatttctctcgagctcgaagatatcgttgttgtcttcccttatctcttccctctgctgacgacgaggaggcggctaggagcagcgccaccgccgccgatgaggaggcggttgggagcggctccatccccttcgcagcttaatgccgctgtcagccctgcgacgaccaaatccacgccgctgccactattggggagctagggtttcgatttttttccggttttttatttttgtgtacaggtgcgccacccgcatacaaaaatagtgacttttgtagacacctgggtgcatgcggaccgtccagccacctacgaaaatcggatttgaccgtatggaaaaatgtttttttactagtgtggtccacttcatttaacataactcaacctaggtcaaccgtgtttgcaagctcaagggtgaaaatgtcacttacatttatacgctgtaagcctacaacattttcgtatccgctaggtagtctacccaaaaaggggtagaaatttagtgcacgtgtgtttccatcactccttttttccctaaaagctttcatctcaaagctttcgtatggatatttatccaaaaaaaaaatctggaaattttcattagaaagatcgattttcatcatagaactcttatacgaaaagtttcctattaattcgtgactgcctgaaatgtacagaatgtacaaaatatgtacaggttgatccgtataggtacaattatcaaaatgaccagtggcaatatacttgatcagtagcatagttttcaaaaagaaaaaaaaaagaccagtggcatagcttcgtagtatgaatctgatgactctcgttgatcgcctaacggaacttaaaccatatcattaaggtttatatttgggatttgggcaccaaccccaggtgcatgcatgtgctgttcattccaacagaagcaggagaaactttgtcaaagccccggtctgaaattaacaccgcgccgatatcgcgaagcgtatagggagatactagttctgatgatcaactgcgcgcggccacgcagaggttcggcgaagcagccagatacatgacgcagaaagcgaagaaaagctatggccgatgagaggcccacttggcaggccaccggaaatccaccaatcactgggcccggccgtacgtatctcttgttctcctcgcgtcagcgaccaacgggaattaccaccaatcacacactcgctaattgtgtaggaggctaatcagaatttagaacccacgaaattaaaaactgaactactgggggccatgagtactagtctggcaatcgaggcggaagacagcgacggcgccacccccgcgtttgctcccgcgaagataagacgaagaagcagaggattcagccaggctaattaagcaaaccggtagtaagtggtttttatgctgctatagcttagcttaggtaggtggcgccacttagcttcaccacttgtgcggctttgctccccaggcaccagctcatcgcaagccaagcatacgcatccatccatccatctccccgctcaaattacgcgtctcctcatccccggccgcgcgcctcctcgtctgcagctaagctagctagcacggccctctgctcgtccacctcgagagatcttttcaccatggcggacctcacgcttctcgcccgcttcttcaccgccccttatatagcccccatccccctcgtgcattccatgacacctactagtttagccatctgctggtctcgatctcctcttcccttccctatctatactctctctatctccctcttgttgcataatcatatcgacttcttgcaagctaggttcgattgtgttgagacgcatactagcttaattagcagctggccggcagatattctcttggtacagcagccatagctaggggggagtaggtgcactgtagcttaatttggcggatataggtcatcccaaggtgtatatatgtcgatgggtgtgccctaatggtacatggctgacctgaccgagcatccgtcgccgactgctcctcctcaagtgcaaacagctggcctgccggcggcggcttctccgggtcctgcctcgcctcattcaccgtcggagcaaggggacaagacggcgcccggggcagccacggcgtcgacgatgacgacggcgagctcgggcgagccgtcgccacggtcctcggggaagcacgccttctaccggggcatccggtgcaggagcggcaaatgggtctcggagatccgcgagccgcgcaaggcgcgccgcatatggctcgggacgtacccgaccgccgagatggccgccgcggcctacgacgtggccgcgcgcgcgctccgcggggccgacgcggtgctcaatttcccgggcgccaccgcctcccgccctgtcccggcgtccgcatccccggccgacatacgcgccgcggcggccgcagcagccgcggccgccgcgcaccttgagcggccgcacggccccaccggcactgcctatcctgccaccgccgcagcggagcaccaccagcagcagcagcagcaacagtacggcagtggcagtccggccgccgacgacgtctcaggctacccgccgatggagggagggattggcaatgacgatttcatggacgaagaagccatcttcgagctgcctcagctgctgcgcaacatggcggctggcatgatgatgagcccgccgaggctgagccccaccacctccgacgtgtcgccggagccgtcggaggccggcgagagcctgtggagctaccgtgatccctagcagcttgctccgattgcatccatcgatcgatcgacgaccgatcgccgtgtcttggtgagctgggcggtaattaataaaatctaagtacgtactactatagcatctagctagctagcggcccgaattaatcatatgcatggcaagataaggagagagagaggtagggtacacttaacacacatcgacatggacccaagaggccggtgcgccgcagcgtcctccatctggtaatatatagtatgtgtgttgtgtattactcctatatatgtgctagctatcagtagaccagtacccagtcgtcatgcagttacacatagcttcgattttgtgtgctagctagctagctaagtacctttgcaattttcttttcttttattacttttggcagttcatttttcctttcaattgtgattcggtgtgattaagcaaagtccacttgctgattcacttgaattattgctcgttttagaataagagcatgcaagcacgtgtttttttctaagtgacaagtggatctcatgtcagtgagacttttgcggactatatatatgtacaggggtgccatcactgtaactgtaaaccagataaaatatttagtggtggataagcaaagaggtgcagacatgcatgcatggctacacttaagccttttctcgatgttgtactgtattaccttttgttgtagcttatatataggaatatgcaggttggggaagttggccgttgaacagatccagagcaagcagtttggtgagcattctttaagttatactgtgttattgtttcagacaatatatgtttgccattcttcaatagtaatacgaagatttgatgcccatggaactatgtgagactagaatctatccttaaaaaaaactacgtgagactagagttataaacatggagtagcaaattctcaaacgaaatggctatggggtctattcgattcagctggactgtggttgtacagccacagcgctgcatccctcctagtataaattgtttactgagtctttgtttacgcgaaaaacagtcttgtagatgcagcgctgctgctgtcacagtgagctattctgaacgcactcatgatttaatgggtacgatccatttccaactcaactaatacacagacataactgttgttttcctagatctacatggagagaagctgagcgcaaggattggtgaatgagacgcggtcgaatgctaatcgtacgacatgtatatatatgtatggtaggactcattctcaaatatcaccatgtattaggtagtttgtaaattatcgatattccgttagctagatttattttaattgtctaaaagctagattttcttaaaataatcacatagtgttacatttaagtattttataaatatgtgataggaattatagagttgggttaatcacagttacatatgcttcaggttgcttctcaaatactccctccttcctcttttgattagtttgaaaaatgaactaaccaacatcaaacaaataaaattggagggagtagtaattaatcagggagctttaaatttcttttaaaaggtttagaacacatcttggatagaatgattcccctggtggtgtttggatctagcgacttaactttagtctctttgtttagacactaatttagataattaaatatagactacttacaaaactaattacataaatgaaagctaatttgcgagataattttttaagcctaattaatccataattagataatgtttactgtagcatcacataggctaatcatggattaattaggctcaatagattcgtctcgcgaattagtccaagattgtggatgagttttattaatagtctacgtttaatatttataattagtatccaaacatccgatatgatagagacttaaagttttagtcccttctaaacaggatctgaagctatttttaaagactttccttgcctagctaacccttcggtcgaaagtctatgttttgcttagagtagactaggcaagctgcaagcacatgtgtgactaaactgtttagtactacctaattaggggcacttacaaatttatcactggtttaaatcgttactgcaagattgtccctagaaccatcattcaagtgacatccttacaaattaaaaaaaaacagtggcaaatttacaaatgcccccatcatatcaaattaatttcgggtacggtcattgggattaaccccccaaaaaactgtccattaaaatccttgaacttgatactgtgttgttaattaagtttgtaccgtggtcttctcactatggccaaatatcacaaacaagctgaaagtatatgtaagggctttttttcctacgagcatcagtaaagttttaattttataaaaagatcgaatactcatattcacctcctgcactgaaaaaaaaggtgtcactaataacgattaattggatcttgagatcaaactacgttgctcatgatgcatttcagagatcattagatctggcattaattcatgacaattttgtgagacacaattcacatgcatgtgagtcagggatatacctttgcctgattatattggtcataattgtacatcgacaggagtcagggacgatgtacctttgtcttcactaagggccctttgaatcaaagaatttatatagaaatttcataggattcaaatcctatagtaaattttcctatttagctctttgattcaaaggatttaagctttccaaatcctatgaaattcctatggaatggcacattgcatgtgtattttggaggaaatttagcaagagctccaacctcttggaaaatttcctttgagtctatctctctcatctgattcctgcgtttttcctgcgctccaatcaaacgaccattcctgtgtttttcctgtgttttgcaatcctctgttttacacttcaattcctgtcataattctgtatttttcctaatcctccgttttttctaccctgcgattcaaaggggccctaaagttttgctagttttcacccattagacaaaggactgaggatcgaccattgcaatcaacagatatgtaagcagataaaaatgaaaaaaaaaatgaatattaggaaaaaacctaatattaaataattagaatgggtgaggcttcgaacccagatcgtctagcccaccgtcttatgaacctagccggaatacccctagacgttctcaggcagttaaaaatgaaatgcaagccaaaataatatttgcacgtataatagtgttcacaagttaacttttgagtaccactaattaagtaaatatagctcctttaaggctttaattaagatgggtgtgcatattcattccacgcatgtctcaagcagattacgtggtccacgagttatgttcatgagttatcaaccatatacagcaaccgcaacttggtgaaaactgtcggatcaagctctcactacaagaatccgtaattttttttggcggtcaaaaactgccaaggttaattattccgtcggccgactgccaggtttaaaaagacagaaacattacgatttcttggcggctaaccgtaagaaaatatcttcttgacggtcggaccgctaatcaaattaagaaaattgtgaactttcgaaagcgccaaaaaaaaataaccctgtcgtcggctcatgttctctcttttccctttttcctccagctaatcacgacagttgatgtggcctccatatcgtcagtccactgtcgattattgtactcgctctaaaagtcagtgctggtttggttttgccgtggaagttcgtacgtcatgatttgtatgtgctctaaaactgatagcgcgagcacatagctatccacatgtgagcacaaagctacgtcatgatttaaaacctgacggtcagctttttcttaaaagtcaaaggtaatcttgttttttaatgtggtttttaagttgaattttaggtgtatatatattttttagatgggtacttctctttgtattccagaaaaggagactgggcaacgaaagagaggagaaaaaaaccctccaaaaaccaagggcaacaaaaccttcatcattcattcactatgaatttaattctcatagatcaaaatgctccatcactttgtgttccatagactgtatcatgttttaaatattacatagtgttgcaccgatagaaattaatgttagttggttgtgtgcgtgtaacgtattcaacgatgtccatttactttttacacaaataaacaaaaagacttttgttaattaaatgatgatcattttagtaagatatcaaaaattttagatgattgttaaactgggatgaaggaagtagcttttaattcttattaagataagatagaagcaatatccacacgtttcacatttcttagtgttgtaatttgtgttatgttttgaggacaaggcgactctcaactagtttcctctggttatggaagcaactagatgtgtggacacgatccggcctataccaccagacttcttctgcatgggcctagctctcatatgagggcaatcaatcagtaatcctatttgtagttaaactttgttatacatcccgctatttaagagctaaactaatcagcacaaaaatatataatcgacaatgtcaagatttatctggtccttagaagattatatacatataactcacaatgttagttggtagttatatacctactcactaatattaagtatccttatatcgatactctcatagtcatatgtactaaagaaaacttgaaaaacagatacaaatatcaaatttcaattattctcttatttgtgagatgagttataatttctatatctatactaattaaaaactatttagaagctcccacactaaacaataagatctggtcatcaattagatagatcgtatatgccctagatctgcatttaatataataaagtgttaaaaacccatatattctgcatgttgtaggaattaaaattccaaactgaatacaactttgattagttattagaaaaaaaaacaactttgattataaatttgaggcttatcaaaatatggaaaattaagctacaacttggtctagaccacattttgttgtaggagtagttgcatgcaggatatatctgctaaataggatgcacctagtatagctagctaaaaaacagagggatctcaaaacgataatactactaaaagacaacgtacgctacgtaccatggccaaattagcacatcagcacatgcacgcacagtgcaattcctcatcatgcaccaaatgcatccccggcggcccggcccttggtacttgccggccggccgccccaacacgggagagaaaccggacgtgagactacatatgagtgctagtggaggtgacgctaccagcgacaagtaccgatcgatcgacctttttctcgcagccatcttgctcgctgccgtcgagcgcatgggcttgccggtaggtacatacgtacaccgccgcacagtgcgcgactacggccggccgtccgggcatcgtgtgcatgggacggacgacggacggaccgatacgcacgccgtcccgaccgctggccaaaatggacggacacgcgcgcgatgggcgcgcgcggtagctagcaagctacgcgggccaaaagacgacggatccattccgcgacaggccccaccgccaggggtacggcacggccgtcgcgtcggggtcatgcgcccccgcgccctcctgtacggcggaggctagcgacgacggacggggcgtgggcagggcggcgtcgccccggtggtgggccgcggccggccggcgcgaggccggagctggaatcacgccatggtggccactatgcactagctagccgcggccccacgcccccgcgacgttacggacgtttgcgcaccacgcgcgccgtgcacctgtccccgccgcgcgcgaccgctcgtccgctaccgcgcgctgaagccttagctagtggcaacggacaagggcaaacaatggcatgcatgcagctgccggccgggccaccgtacccggctggaccaccaggtaagccatgcacggcttggctgatcgatcgacccaactctaaaaacttcgggccggctaaggcggctgcatgaccaagctagattatcgacacatgggcgttgctggcgaataattagcgtgcatgtcctagagctaccagtctactcgttcatgtacggattaagagcaaggctaataatatagccgatctgttggttataaggtttttttagccttctttcagtctacccatataataattagctctttacaattaatatatggctcacttgtctcgtctctctcacagagtttcttggttcttgtgtccaagccggctgtaagtttacagcccgcttctcctttctctcttctctcttttctcctccacctcagtatttagccgacttatagtctactactatacttgctctaatggcggcccgggaaagacgctttgctagctataggtagtactagaggctacatttcgacagtgtcaggtgctaactttagagttgtcgccattcttttcatccgtttttaatttattccaagtgtttagtgtgcgtcgtcgtcagctaggtcggtccaagagagtagactaaaaaaaatgtgaatcaggcataattcaaattgtgtcatccctcggaaaaaataattatgggagtactaatcaactaaaccacatgaactcagcgacgagcccaggcatctgtacaacagtacaaggctacaagccgtaggaacggtttgaaattttggatcagcatggcatatgactagcacgatctagctagggagcactgtcacatgcatgtacggtatgcgtgcctagtgctgcactgctgcatgtgcgtgcccctaggtgtacaactatctcaaagaaatgggattcataattataactccttgcgattacttgtcattctaacgattaattttttttataaaaatactaatcattttcacattccaacattttcagagattaccttccatctctactatttactccctccgttttttaatagatgacgccgttgactttttctcacatgtttgaccattcgtcttattcaaaaaatttacgtaattataatttatttttgttatgagttgttttatcactcatagtaatttaaatgtgatttatatcttatacatttgtataaaatttttgaataagacgaatggtcaaacatgtgagaaaaagtcaatggcgtcatctattaaaaaacagaggtagtatcaatgaaggcatatacaactgttaaccagagtttaatttactttgggagacgatgaaattaggatgtaatttgtcacaactccttattccgtatgagatttttaggatgacaaataatctgaaacagagagtacgtattcggtagttgaatgatatttttaacaatttgttatccacccttgtgctggataataggacagcggatcatcgcaccttgccaacaaaccgccctctaccaaagctgcctatgatctaagcttttctgagttaccggttgacccatttgctgggcccacttgggacaaccatgctcaaaccaaatgcaagatcttcctttggacggcgcacaagagacgtatctataccaatgacaggcgggtgcggcgcggactagcaacttccgcgtgatgccccttctgccccatcgacacttctgccccatcgacaaagatgtggaacatctcttccttcgctgctcctgagtggcagccatttggcactcctatggactcgatgaacagcaagtcgcctccctagcacagctcgaagacctatggggcctcccactccctgacaatgctctcacccctcgggtctggtgcactatcttactcgccgtcgtttggaacatctggaaacgccgcaacaacaagatcttcatctccatcgacgaaaccaacacgctagttcttcgtcgctgcgccaacgatatcgagttgtggtcaaaccgatgtaacgacattgtaggcaaacaacaacttcactcttgggcgctaaatctttctgtaattaaccactaatttttagtttcttctccctgtccctttgtacctccccctttgtgaagatttttaccatatgaataaagttcaggctggtgttcagacccgccgtagttcctaaaaaaagttatgtttgacggtcaaatttactcgagatcatggtaatacttcacatcaaactaacaccgtgctaaccttctagccattgctcctgcacggtgtctctctctgcagcctacctatcattgcacccctccttgatgcctcctccctccttcactttacaaccatattcttgacaccgttataaacttaatctggcgcacaacccttctatgatacacctcatttatttctagcaacttgcacctttcgaatcctctccactcttagctacgttttaacaactttgtaaagccactaccaacgacacacacagccctccttctctctcacaattggcaatatggcaccaccacactacttgagtgctgacttagatggtgtttggatctagggactaaactttagctcctgtcacatcaaatgtttggacgctaatttgtagtattaaacatagactaattataaaactagttccataaataagagctaattcgtgagacataattcttaagcctaattaatccataattagcacatgtttactgtagtatcacatagtctaatcatggattaattaggctcagtagatttgtctcgcgaattagtctaagtttatagaatgggtttgtcattagtctatgtttaatacttctaattagtggcatttgtcatttgctagtctaggacaacaaattttgctaaaaagtgctccgggaccaagctttctctctatctagtgctaacatagcaaaactttaggatgcatataaacactaactccatgccaaattttttgccaccaaaacttttgccatttgccatttgtcatttcaaatggatctaaacaggcccttaattcacacatagctaatctaaacaccacggctaccatgaggaagtactcatttgtacatcttactttagttataggtgaaaacaggcaaagtgtattcgatctcaatccaacggcctataccagtcagctaatattcaagaaaatctcacaaccatgatgtatatcaaaactgcaaaaaagaaaaaaaaacttaaaattgttgtattatgcaccataatatactatgtattatctcctcaaaaaatatactctgtattggtctggacacaagagatagcaaaccgataaaataaaattataatgttataaatagagtatttggtccccttcgaaagctgacctgtgtgacgcgctcaatcaaaattttcccatctcatcctttaaagtttagcctatactcgaaaaggagtcgaacaacaatgagatcaatctgcattcaaatctaaaccaattaacatatctctagatctgtagactacgagaagaagaagaaaaacaacaagtgacgtctacacaaggcagagtacatcctattgtgcagtggtgttcccacgttcaattacctagctagggtcctcaatcctaaataaaatacaccattttaattaatatatgaactaataattagataattactatgtattgaacttccggtaatttttgttataattttctcactgttattgggcatatttttcctcgtagtaacatgctttagactttagctctgggcaatgacgagggaacagtgtccagcaaccttcttctcccggttatgtagaggagtcaacaactgggataggtgctttccacgggcacgacttgggcccatcctgccctggtctgagccgccgattcaatgatcgacggcccagcaaatcactgggcgctcgtaccgcgtgcctcatggggaggcccggctgctccggggaaaaaaggagtcaattaagcagtgtgccgtgcacgtactgttccatatgtgcagccaagcaggtgatcgaccataggcacaaggcacgtacaaactgtgaaactgaagcgacgaataatgatcagcttaattactttaattttctcgttaactagtcaaacactttaaggtaacctacaatttgcatgtctcagttcaacgcactggtggtgcacacaatctgccgatgcgatatgcacgcagagagttacgtatcttctgtatttttggttcctctttaattaaagatcttgtgtattttacgcgttggcgtgtgaacgaaaggggcaaattgcggcgcggcgggggcattgcattggtcggtagctttcccgttttatttctctcgatctcggccggccgaccaagatcatcagctttgcgacctcaggacggctcaacctgaacgtgctgatggagatggaccattaaccaactctgagagaaagattaattagagtagtagtaagacgttgtactgatagtactccaattaatatatcgattacgtagtgtgccctgtgcagaagtcctcctgcgtacgtacgggtgtgggtctgaatctggagaggatggaaaagacgaacagtggaaccgtcacacgtgcggatgtccagggacaggcaacagacatgaagtcgttagcacgatcttaggttagataccctggtcccaccgccacgaatagtgtgggccccgcttttttgcccggctcttccgcatttccaccgtgtttagatcataattttttcttcaaacttataacttttttcatcacattaaactttcatactcacataaattttcaacttttccatcacatcgttacaatttcaatcaaacttttaattttggcgtgaactaaacacatcgtgagctcacgacctcacgtatgtaaatcgatcggccattggggcattattttgggactagtttagagtacgtactagtaccatacgactccaatatgtcgggtcgaagttgttagggcctgttcacttgatgtaatttttaaggacatgtttacgggtcgggcgcccgatcggtttggagaaaaatcgggcgctaacatcagcatgacgtcagcgcccgatttacgtgtaaaactactttaaactgatttttctcttaaattatttatccaaatcatgattcgattgcaccattaaattcgttgtaattaaatcttcaaaacaagaccacacatggatatattccgacgaaaattttttttagcgtattattgaattatttttaaatgttgcacgatgtttcaccgggtatatcggaattgtttcactaagtatattgaaaatgtttcactcgtttaaatcgggtgttgtttcacctttatataaaacaatgtttcagcaaatagcgaaagaatgttttagctcactgcaacatttgatccatacatagtgaaacattataattacactaggtgaaatattttttggtggaacaaaaataaaatgaattctcttaatagggggcttctaaaatatgtgggttttttattgcaatggaatatttcaattcactgcaacattagacctatacatagtgaaatattgtgagtacactaagtgaaacatttttggtggaacaaaaaataaaccaaattcccttaatagagggtttccaaaatatgtgggtgatttgttgcaatggagttgtgtggataagtggcaggtggggacaggggacatgtggtgggggcccagagaggctgctggtgcgcacgtgatggggggaggggggagcgaccgatttttccccctccccccccctcccccgccgcgaccgagaaggagcattatcgtatttttaaccataccattttttttaggtaaagttgctacaaaaatctacgtttagttttttactaaatttggtcaatacataagaaattctgctaaaattttgacaatattgctatcttgctaatattttttattggcaaaacttgataaggtttatttaggttacaatctaaataagtccttaatatctttttcttcctcttgctcttgcgacttgtgtagttgtgtcatgtgagatgagatctcttgttatcatggtatcctcacacaaaagagaaatcaagttacgagttacgacatgagcggagctgattaatcaaaccatcaactcgttacaactcgtggtaagcagaaaattaaaggcgtctaatgagtactgcaatgaggtccagtccaacgtacaacagctcgtcccgtcgtccgttgttacagtattgtctttgtccactttgcacggtttctaaagctaaggttcaagaccaacttgctctgttgcagtaccactccatgtctccatccgtacgtcttggacaatctgaagctacggtccaaaatcaactccttttactgtgtcctctctaaccattttccacagtttaatctagcatgccactcctgttgtagtattatttcgaattgaacatttttacacatgtttcccttttaaatactaggtactccttatgagagaatcacgctagtatgaaagtacaaatgaaacattttggttgcactaccacatttttacagtgacctgtatgcagtcaaattaattattagttgaaagttaagagtgaatgaatctaaaacaccagggtgtgaaaggatatgtagccggtcgtagtgagtatctcaaagttctaagtttaaatctccatttgagaaaatttcagattaggttgcttgatgagttgaatcccaaatttaaaaggttccatatatccggttggatgtaaagaccgagtaaaaaataccttccaaaaaaattctaaaataccagggtactaccagagacaacctttttgttgtcaattccggatgtctaattgagttgtagtaacaaatcatttcttcctatatagttgatatccactcaagtcattaactcctataaagcagctctcacgttaagccacatcatcacaaattcctgagccgttagatttgatctcaatgttccaatccaaacgtttcagcatgcacgcgtcagagaaacacatacttgatcagtacctgacggttccaatgcatatagcctgcttaatcttccaattgattatggaaagaggggattaatgcatcatgaacgattcatttacaaaccatcaaggaggcaagaggggattaatcatttactctataccataagtccataactccgtctatactatatgtattgccatcagatgttatattgtcattcatttatagcatgcatctgttataagtcctctacacagattgcttatccatctaggggtactccatccctgaagcttcatcaagaatatattcagcatccatgtaggcgattagcaatatcaatgatcgacgaagccgattggcaatatgtgagcacccggtctccatcccaacctcatgattcttattgattgatgttgtgcttaactgttcattttcttatctcaggttaaattccacggtgaaattgctaggcaatacatgttgttagtacatactccctccgtttcacaatgtaagtcacattaacatcaatatgaatatgagaaatgctagaatgacttacattgtgaaacggaggaagtactactttttgcctttcaggtctcatatgattttcatgactaatcattagcgttcagggaacttaattaaagtgggtatatgctctctatttgtagaattttatatttcccctatgttaaacatttatcctttcggatagtcatgttagctactaatctaagtgtaatctttttgttaaaatccttaatattaagaattgtaatgtgttttgaaaaaccaaagacaaaaagagttacagtgtttctttatatattcctctacgttttgtgctgatagatatttttcaaataagtccgcagcaacgcgcgaggtatcaactagttaatcatatgaaggtggtctgatgggcacgcatgctaacttcgcattggtgagatgagatctttcaacggagtgattattgcaggttgttggcaattgtctggagaagtcataataacgctgcatttgggcctacttctctagtctgatccaacatgcaggaagattgtagaggaaactctcttttgaaggtctcaaagccttgcttctggctaatatgtcggccccctcccgcactcccactttgtcctcgtgtactcaatcttcttaatatattggttttatctttttcgtttacgtttatatttatcagttaaattttaaattttcaatttgaaactgattttaaagttttttattaaattttatttttcagcatttgcttttagatcgctaaaaacacgtatataaaagttttattcataattacttttcatttacaaatatgttatttgtttattcaacgaataagcgaaacgatgggacaagtgctaatttctcctttctctcatccccgcccgggcagcatgcgtgcattacgaacttgtattaagggtatagaactatacttagtactccacgtgctttgattgggctgcttaatttgattgcaaacccaaaacacaagtattatcgtagttggaaaaaagaacaactactatcaatatctgctccatgcgtctaattaagctgacaattagtactacaaaccacttaagatttctgaaagctacgccgtaacaactatagtaagcaataacagcgtgccatcccctgtgcctgcaaaactgacaagaggggtgcttttcacagaagagaggtttggaccatggaaccgcctggattgcctgaagtataggagtaaggagtagcaggctgatcagatgtcgaatcctcctgctgaagccaagacggctggcgcacgagcacgactgcgcgcatacgcggtacgccgatctggtcatagtcggcggccgcaacggcaaaacgaacggcgcgcgcggcgcaatgccgtatacatgacggagaatctgcggactagtagtagcaggcgcgcgtgcgtggatcgaccaccccacccgccacccccgcctacggcgtcgcgttcggcgtttgttttatcgtgacgacatgtacccttcgtacgcgcgcgcaatcggcatgcggccgatcgaatcggccgaaagggtcatatacgcagtgagccgctcgcgcgccgccgccatcgccgaagaaaagaaaaggatacgtaaaagtgccgcacgccgggagaagggcactgtttcaatgtgcgcgatgggacgtgtgagcctgtgtctatgtgcaccagcgcccaacaggggaaaagtagcctccgtacgaccaaacgcaatgcccaactgcccaactgcttaattatcgcctctagaacggcttcctcaagatgtcgagagaccgtcccaaaacgaaccaaatcctgaaatttaaggacccattttaagtcatataattgataaaaaaaaccttataagatttaaatttctatatttttttacatgttcatttgaaccaagaggtatgagtgtatgacttctttgcgaacttttctcttttctttttctatcaaaggacccatattatattttttgtgttttttatttcaataggatttgagaagcatattatttcaattcttgtatttttcttatttatttgtttttcctatcctgcaaattaaagggaccctaaattttgtttcaaaataaatcaatttctatattttgaattttaaagttgattttgagatattctcaacgtggtttttttcaacattatcttttaagacgctaagaatatatgtattttatacaaattatttttcgatcattatactaataagccattataacttataattagtttgtggcaaccgatgactcttaactatcttaactatttttgagcggttccatttcttttaccttgaaaattaaggtgcgccgtggaccgtggtgtactgctgtgtaatgtatgtatgcaaatgcaacaaaactttttttatacaactccagtttgagtatagtactaactgtgtcggaaactacgatcaaattaataatatgacaatgtgacaaattaatttctgagtttagaatgaggcgtccattcgggcgcgatcggcagttgaacatttgttgtccggaaagatagaaagggatttgtgatatgtgcgcgctattttgtcgactaatggtccacatgacacgatcagctgaacaaatgggtgatcttggggttatatacacattgcggtcgcgatgcatgaacagtactgctgctttgaccaatcattggagagacagaaaacagtggaaaattttagcaagtgcgtgggctccttgtcgcagattactcggtttatattagtttgtgaagggaaagagcgacgaaatagcacaaatgttggactctagcaaattcatactccatgcacaccatgtcagaatgcctggcccaattctttttcttagttctaaaaaaaatccttttctcaaatctaaactttaatttcctcgttttccgtcaacacatttttcaaattattaaatagtgtatttttacaaaaagttactatgtagaagttgtttaaaaattaaataaatttatttttaattttataataataaatacttaattaattttgtgttaatgagttttctcgtcttgagtacgctgaaattatctctcatatctctctcaaatgagagagatatttttcttcatcttgcgtatgctgaaattcacttttcttcatcaataaagcttttttttttctagagaacaaacggggccttatacgagtagcaagtccctggatttagtgatagaataatcatatgagagtcgttgttcacataaggattccaaccctaacgagcgaagtcaatttactcatgactacgctgccttaaaagtgtttctcaaacaattcacttttcttcatcaataaagcattttttttgctagaaagacaaatctaggatgatttgagtatatctctctggtttttaatgtttgatgttactattttttaaaacacggtagacgcccacaatacggacacactcacccatatttaagaaaatatgtaaatatgcaaaatataagttatgctaaagtatatttactgataaaataaattataacaaaatgaatgatagttatatatatatttcaaaacaagattagtattgatgaaacatatgaaaaaaaagttaatgacgaataactttaaaaaatcggagagaatgtttggacacagctctcgtttttctttcacaggtgggacccattttcgattttccagcactggcaaattttgcaaattattttgtgttatgcaaagaacgcggctattagtccgactaacgcattcgactggcgtatgactcaacaaagaattacacggtgtgacttggctatatgggctaccgctctcactgccccatacgtaatataacccacatcaaagcccatatataatttcaagcccaaacttataaggacacacatgtccttttagctgcacggcgacattttatctcatgtctataatttttcagatgaaaacttttagagtttttcaactactgcaacggcaacaatggtaacagttaacgcgagtcatgcacagttagtcaacaaatgtaaatccacctgtactttcacagccaaaatttgtttgattagacatatcaaataaagcaaggcaccacgattttatgttccattttcagagtcacaactagctagtttcattgaacaaaatagaaaaccaaaacataacacactgggcacaaataaatcagcagctttcacacaccttatgtgatgtgatcagtgaatactatcggctagatgaaacaacacggacgtgcggccaaattacatctgattgaactcaagcaattggttagagatagaagacaaaggaattagagagtttaggatagaaggagatggaacgtccggttgtggcaatattatcggctggacgtgactacacagctagtggtaactggtttgtctaaatcagctaccactccatctatgagagacactattcacctatacttaaaatacaattttctcttaaaaccactcatccgatatacgatccgattacatcgttgtattcataacaattaaatctttataacaagatctcacatgattatattttgatgaaaaataataaattacttttataatatatctaaattacttttagatttcactaaattacttcttagacatataaaagtaaattcaataaagcctaaaactaatttacatactccctccgtcccaaaataagtatagttttagcactgttcatgtccaacgtttgaccgttcgtcttatttgaaaaaaagattatgattagtatttttattattactagatgataaaatatgaatagtactttacgtgtgactaattttttaaatatttttcataaatttttcaaataaggcggatggtcgaaacgctaaatacggatatttatggttgcacttattttgggacggaggtagtatattatagaagtaacttataaaaaaagaaagtaactttaattaatgtcttttttcatttaacaaattatcatatatatatatatatatatatatatatatatatatatataagttacttttagatttgattaaaatacttcctatatattcataatgctctaaggtgattacttttattattgtttttagttaattccataatttgtactgattaatttaatttctagatagagtgatgtttttatctctacaacggatttacttcaaatgacatgccaaagttatcttcgttttgttataaattacttctataatatatgtaaattacttttagactttaccgaatttacttttatatttaagaagtcacttagtgaaatctaaaagtaatttagacatatcataaaagtaatttgtgattttttatcaaaatataatcatgtgagatcttgttgtaaagatttaattgttacgaacacaacagtataatcagattgtaaatcagataagtaatttaagagaaaattgtgtttgaagcatagatgataggaatattttccctacttacttaatggattagtaatatagtaaaatcttcaagttagcataaatctagataatgctgatgacgtcactcgttatgactaaattgagagagtgctctcgatttagattttgcgttggacagatgaaatggcgcgcatgcttttgtaaggcccaactgaattagcgatcgtgcggagattcggacggcggacgtcacagtcgtacaagagtcggacattgtgtgtatagcattttcgttatgcaaatactaggcggtaagtgaaaatgatgctgcagttgtcgctaaaaagaaaactactgactgtaacgtcctctccataataaaagttgactgcgacagcgaagtttcgttagattaattacataaccataccaaggaaattccgcgtacttagctatcatagctgagaggcaacaatcaaaagttggctgtccttagctgtccccactctgtaaatcaagcaatctaataagtggtacagatcaaatcccaggtcgacaatagatttaaattttataggttaaattgtaatggtttaaaatttttaattttatttgaagtgaaaataaaataacttatccaaatattatcaatataataataaatttgaatcatggatttgtggaggtgggagtgggattacccacctgaccagcttaaaaaaatattgttgtgcgaaagaggacgaggtttttctttttcaacgtttcaggccgtttatggggtgcaattctgtgcgcttatgcataagcctcatgatattgagttcgcgaagagattaaagatgcataatgcacgtatggcatattgccgtattcgggcctttctctggagaaataagtttaatttaggtccctcatgacattgagttcggacgatatcttccaatcataataacaaatataatgcatctccttcaatttataaaactggattacccgagatcctaaagcagtattatgtctagttttaactgacgtggcaaactgaattagcatgggacgacgagggtcctacatgtcatcggccaattctttctttctcctttctccccctcttttccttatcttcttcaggacacggttgaagggagaagggtggaacgcgaagggagaggagccgcccacagccgcgacggcgagggagcctcgggggcacggtactccgccgagcgcgccgcagcggccgccgaggatgagcccagccgttctaggccgcactctgcgagccacgccacgccagctttgttgagcagtatgttcgtgatattgatgttgtcgtgcactagcctcggcgtcccgcttccctggcggctcgtgtggtggatgttatgtatgcatgctagctaggccacgcacggtggctgagctaccacccagtccagtcgcatgctcccgaggccacggttgcctgtaacatgtgtgtgttgctgaactataggttgaggcgatatagctcgtacaattcccccattgacggtggtactgcgccgtacatcgagttgtcaatgagaaacaacagcttgaggttggcgagtggcgagaaggttgagaatggcgctggagaggacctcccccttgagactaagcacgcggaggccgtcaagaactcaagcctcgcgagcggcgagaggtcgagaatggcgctggagaggccttcccccttgagactaaccacgcggaggccatcaagaactcaagcctcgcgagcactgagagtgcaacatcaccggataggctgaaacccttgagcaccagccgtgttaccaactattcttgctaactttatagatttgttcatgaagagattaatgcacgtatggcatattgccgtattcgggcctttctctggagaaataagtttaatttagatccctcttgacattgagttcggacgatatcctccaatcacaataccaaatataatgcatccctcaatttatctttacatcaaagttatagccgataaattatctttacatcggactaaaaagccgatgtacgctttaaccatcaagtctacatttaatattacgtatcaatatcaaacaatgccaatttcaagactctaaagctaatactagctctaaaccaaagacgatttcggatcttaccaaattttagcattaacacctgccatcttgtgcagatgacccgtctcagttagataacgtgtagtaccggtcggcgcccaaccgcaagtctgacagcatcgcattgtcggtataacatacaaagcgtcacgacatcagtgtcgacaagaagagcaacaacagagtggcgtcgccaccgtcgctattgcgaggcatatgctccgtagtactctttttattttgttcaagcttgacctcacatttggcttgtgtgcgcgccactagtgacagcgacgtgacgaggttcttgtctgatgctccccacctcccaacaacttccctggttcgacgccgctacccaactccttcttgccagccacacgctgcccttttccccatcagtcgtcaccctaaagaaaatagcaaatagaggtggagagaggaggaagaaataattggtcgctgacatgtgggatccacgtagtcccacgctgattcagcttgccacgtcaactaaaaccgggcataatactatcttggatatagggtatctggttttgtaagttaagagattgttatatatgacaagagacctaacgcggccttattcctttcctagtatgtccttcttagccttccggcccagcaataattgcgcatgcaatgcaccaccacttttaggcctactagttgttcgtcatggtctcgcactctctgatgtggtggcggcagagatggcaacgggtgcgtacctatcgggttcgcttaccccatacccacacccatggaaatcaaatgtccccactccaatacccacacccgctcacgggtgaaaaattcccccatacccacacccgcacgggtgacgggtacccattgggtacccatactcattggagctgatcaaattatgcacaattgcacactaatccatccagttagacaacccaaccagacagcagtacaaatgtacaacacatcatagcagtgatttttacaaattaggatcaaaaggtcaacaaattaacaaatcaaatggtaattcataagtctgatgccaggcatgcagtccactccaacatacatccagccatcctacaatgcatccaaagaccatcgccatgctgctgtggagttgggaagagggaggtgtctggaatttttgggtatgaaggctgaagaaggcgagatggcgacgcggctgcagcctcagtggctctgccacgagcccaccacagaatccccaagtcctaactctagctagccacctgcgccctgtggtcctgcctcggcgagtcggagagcggcccctagcctcctactgcatgcggcggcatgggtgacgtgcggcggcgcgacagcgcaggtggagtgcgcgcagcgagcacggggctggcgtgcggcggcgcaggtggcacgagtgagctcggtggtggcgcgtggcgacgctggcgtaggtgggagtcgcgggggcggcggctagccacccaaacaggggagagaggagtaagggagaggaaatatgtgagatccttttatacctagggttagatacttagagttgttcgtggggtttgggctgcacacctattgtgggctgcggcctatgggtatttttaacccacgggttaagttcgggtgagtagagaacgttttaggacccgcctcacccgatgggtgaggtttttggccgataagagacccatgggtttaatatttgaaacacatttgacttctaatagagtaaagacccatcgggtatcgggttatggggccccgttgccatctctaggtggcgcctttgcaggcggtatgtacttcctgggacgagaatatatcttgccaaccgcaagcctgaagcctctccttagcgatggcagtgatgcccacggagtcgggtatccgtggatacccaacccgatgggcacgggcgtgggcacattcttttgtccgtgagcatgctcaacctgtcatccgcgaacttagtgggcacaaccgggcttcatatttcacccgtgggtaacccatgcccggcccgaaaacttatagcccatgtatgtccaattatccattaaaccttcaatagtttaatatccatcctcatttatacaagtggtatatatattttaccctaaccctaatctctcctcactcctcactccctcccgtctctctctcggcgcagtgcacggtagggggctgcgcgtcgtcggcgcggctcactggagggggctgcgcatcgccggcgcgacaaatgggagggagcgcaggcggcggcgcacatgcgcacgggagggagcaagcggcggtgcacgcaggcaagcccgtccactctgtgtctccgtccttgtagcatgttcatcttatgccagatctgaaattgatgttagtatttgtgtatgcatgtttcttatgccagatccagatctgaaattgatgtttttagtatttgtgtgtgcatgttatttatgcatttatagaagtgttgaacataaattatacttttgttttcagattatgtggtatctagtggatacccatcaggcatgcccgtacccatcgggcatggggttttgctcgaaagacttggcggcgtgggtcgggcgtgggcgtgtgggtctcgggtcgggcatggaatcgctctacccgtgcccgacccgacccactgccatccctacctctcctgtttggtggtgatcgtgtgcgaatatgtaccagtacttcagataaagagacattgaaaaccttattgcaaaaatacatgatgcatttacagatctactcactttgtcccaaattttaaggcttataatttttttacacggtcttcaataatgtactttgaatagtattttattttattctatgatcccaacaaatatgaaattagcatcatatgaaagtattttaaaatatgaatatagtgatataacatgcataatactatttaggcagcgttcgagagggtgagagagtgagtttgtttgtttcgttttccgcgcgcacattttccaaactactaaacggtgcgttttttgcaaaaattttctataggaaagttgctttaaaaaatcatattaatccatttttgaaatttaaaatagttaatactcaattaatcatgagctaatagctcacctcgttttgcgtatcttcccaatcttctcaatccccttctcctcaaacacacccttagtatagatatagttagtatgattattagtcaaaactatcgagtttgactttctttaaaaagtgggcgccctataatttaggatggagggagtattcacaaactgaatcacgaatcgaacatgacgacggtacagcaggctgtgttcttttcctctcttttccaactcatttccatcgttttctacccgcatgcttttcaaactgctgaacggtaaattttttataaaagttttttatataaaatgctttaaaaaatcgtattaatccatttttaaagttttttaggctaatacttaattaatctcactataattgtgtgctttgttttccatgtcgggaggcaaggttaacacagaagtaatgtacttggtaatctttgactcgcgtctggtatcactacagcgcctaagcctaatgtatggccacactttcgaaggcctagatcaccgtggaagaaatgaagaattcggtgggagtatctaaagtttagaagaaaggaataacacaccaggagtatatttttgggctcggtcgatttgtgacaaagaaactaggcaaaaggaactcctttgaaaagaaagagaaaaaaattgtaatccggtgttcttttggggaagctgagaaagtgtagtatcgaaagtctagagctctagacctatcgaaaaaataaggaaaaagtgcaccggaggtccctgaacttgccaccgagatacgaaaacgtccccaagccacaaaaccatatatatatatgggatcccttaactatacaaaaccggtcacccaaagttcttcggtggttttgaacccagttttagtctacatggcggctgagtcagcgtagaacccatctggcagcatgccacgtcatctctctctctcttcctctccctttctcctctctctctctcttcacttttctccagcgggcgtgggcggcgggggcggccgcagcggcagcgctctgagaggaccggggacggtggaaggggaggaggggttgacccgaaggtgctgcggtcgctgccggtcacggtgtatagccgcaacacagtggcggcggctgcgaaggaggaggaggacgacggcgtcgagtgcgcggtgtgcctcgcggagctcgaggagggtgacgaggtcaggttcctctcccggtgcggccatggtgccgcctcttcttcctcccgtcccgccggcgccgccgtgatgcacgacgacgacgagagtcgaacacgagcgcgctcgtgggcacctaggccacgggcccacgcagcgcgagcacgacatagttgcagtgcgccgcgcactcgaacccgcgctcgccctccgccgcggcgaactgcgtgtgcacctccagcggcatccgcgccacttccgtccacgcgccgcagctgcttgctccacctccgtggccgccgccgccgccgcgtagtgtccacaggcgtccacagcggagatgttcttgacggcgaaaggggacacgaggtcatccccggccacgacagcgatgatggaggtcgggccggtggtgaggccgacggtggtggagaggcgcggggtcggggtgatggggagtgcggcgaggaggcgcgtgattgggtgtgcgagcagtagcgtcttgtgccccgatgcatcggacaggaacgcgagcaggccggcggacgcggccacgggcgggagcgggagcgggagtgggaagcggaaccagctagagggttgaacctggccagcgtcggctacctccacggcctgctgctggggcggtcagcgaggccggcacggagctcgcggcaggtcaggaggtggccgtggaggttgcggcaggcgctgcgggtcgtcccggcggctagcaagggagggagaagcggagcacaccgtcgatgtggcgggggaggaggtggaggacgctagccaccatgccgcggcaggatctggcggcggaggaggagccgaggaggacgccgatgaccaccatggtgacgccgacgaccatcgggagaagcgaggaaggccgacgccgacgaccaccatgcttgccgctagtgggcgccacctccaccgcctctgcctccgtcaccaccgcctaccggttgccgctccccatccgccggccgccgctcgctcgcccgcctgtcgccaccgtcgccccgcgcctccgctccacgtaggcggcggccgcacgctcgcacgcttttccggccgccgcttagccccgctcaccgccgcccgttccttccccgcggcaaagagaagtgaaaaaaaaaaaagaagagcaaaaagaatgggaaagagagagttgacgtggcacgctgacaggtggggcccacgtgagtcccacgctgacttagccgccacgtagaccaaaactggggttggggtcaaaaccaccaaaagacctcgggtgaccggttttgtatagttaagggaccccatatatctggttttgcggtttgaggatgttttcgtatctcgtgacaagttcagggacctccggtgcgcactttttccaaagaataagatcggacccaaaaatcatggcccaatatcttatgtagttgagctgggcctggagttaccagagtaggctaaggaccgacgcttttacaaagcctagcccaagaaatactccttcagtccaatagtccctcactccatcggctcggttgtatagtactacctacgtccgatgatttatgtcgctttaactttttctttcaacgtttaactatttattttattttaaaaatagtgcaaatataaaaaggataagtcttaagcaaatcacaaataaaataaataataattcctaattttttgaataagacgaatgatcaaacattacaaacaacaactcaaagcaacaagtaataagcaactacttatatcatatagttctgctctgcactccatgatggaattatcacaatcatcacccaatcaaccatacacgacaggagtactccctccgtaaaaaaaaaaaaaaaaagacaacctaggtgatgatgattttacaccacctaggacaaagaatttgtgtgaggtcaaatccccacctaggttgccttttttattgggacggagggagtactcttacagtactccctccgtcctaaaataagtgtagccacgagtttccgcgtccaactttaatcgtccgtcttatttaattttttttggaaaactaaaaaaatacaagtcacacataaaatactactcatgttttatatttcagtaacaataaaaatactaatcataaaaaaatcaaataagacggatgatcaaagttggacacggaaactcatggctgcatttattttaagacggaggtagtaaaaaagagatattgcgtacttcctcaatcacataaaaaactaatgtattagatgtgacgcattctaatactactatgtaaaaaaaaagaaaagacaaactctagttatgtgtccagattcatagttatgattggatatttttgggttgaaggaggtagtattacgatgtgttatatccggttataaattagtcttttgtggaattgagagagtattttaagctgggctgctctagaaactttcgtgctctgggaccaaaaatacacatgtagaggtgtctccatcaagattaaaataaagagctcgagtttagctgtagcaaatccatagtaccgtatagtatcattcaatacgctggccacctaactgccaaaccaacggtcgccatttatccagttgcaaagaacctaaaaccagatccagctatggagaagtggagccagacagcagaaaatatatatatatgcaagtccctgtccatcacaattggcaccccaagaccaagtccaacataactgccctataaccgtggagtgcgatcctttgtggcagcgcctattatgttcattgttgctaccctaccaagccaaaaagatcatgatatcctaattagatcggatgccgatcctatataagcatatttttaaaattaaggtggatttaaaataatatgaataagtctactcaaatttacaatatgtcaattgaatttgttgaatcaatattataggcttaattgtttctacaatttattacatgaaataaaatttcaagcgttgctatggcctatatataggaaaattatatgttaataagtaaaaaggagatacaaaataaatatgtatttgctttgtaaacattcttcttacatagatccttcaatgatgcaagatttatttcagacgtgtaactttataagagaagggagatttatttaacgatgaaatatgaacgatttgcaccattggtagataatacaaaggctagacaaaattaaggtgatatagctttgtgataggttatcccaaatattgtacttgtgtgatttagatgaataagagcaacaccggtttcgaccaacaggatgtagggctattaactgtcagataagaggataaggggtctgaacctgtataaaaatccatgtctccatctcttttacctcaatctcacatataccatgttaccaatgatacccatatcatccaaataccgtagtcgcgatcttaaacatcgatagaattgtcaaagcaccatccacatttgtaaaaaaaaaggatattgtgctgtcatgtggtggttttttttttatctatgaatgctaagtatataagtagttaatgggaaataactaagatatcgataatggatggggtaaacaagcatggaaataatctaatatttccttgttttagaagtgatatggctcaatgcatgttgagcttttgagcttttggtttaaactatatagaaatattaagtgatgttcagcgcgttgttgcaaaatctccactattataaaaattgaagatgtttttgtcggtattttggtacgtcatccgtgtatgagtcggtttttaagttcgtttgcttttgaaaatacatatccgtatttgagtcggttttcaagatcgttcacttttaataatacataacgaatcatataagaaatctgtttaaaaaaaactttcatgctaacttgagacgatcggactcctaactgcagctcatgattttctaataatatatatatccaagcgaactcccaaagtaaattccatcttaactaaaccatataacaataataagattaaaataaacttcatccgttacaacgcacggacatttttctagtacataaataaataaatgttaaatattataaaaataaaggtagctatataaaaaatattatgaaaattgatatgtggatgatgatttgacgtgcttgcatattgagttttagaatgtaataaaaaaatatagataatgtgatatgtttgcatgggttttaagatataacaatttagcgggtatggatgtggcattcgttcatgttgaactttagcatgtactcatatatagaaagtatatatatgattgcagattttatataaaactatgcattttgtaaaatatgatagggtccaattctataatttgattctacgggttgacactgttaagaaaaacaatcatcaagtattcccatcctgttaacattgatcaagtttgagttgcagatggtaggattcaaagatggtacgcattgctctgccttaaaaaaaaaaaaggaaaacaaatggtatggcttatatatggacggtcttatttattggcttatgcttataagttaatatttgaattttaaagcttaaatttgattgttttttatcgctgtttattttacaacatttacttatatattatatatataagttttactcataaataatcttttatttgctaacaagctattgggactgcgtttcacagacaatccaacccgtctcgcaagatgcaagccgggcgagtgcgcatcaaactgcccacttggagagatactacgcgacatcgccttctccggccgtcacagtcacactcaacacagacacatccgagtccccttttcaacatagcgtcgccgtcccacgagacaacgagaggagcgcgagatgggagccccaccggccacaagagaggagatgagagaggcccagagcggcccacttccgtcccatgcctgcgcgtcccgcgggtccctatcgccaccccgcgagctccagctggttccgacccaattaacgtagcgcccgccggccccgtctcgagcccaggccagaggctcccgacccggcaggtcgcgcgcgctgctgctacctggctggcgcctctcgtgccacaccgcgtagatacagttaacgcggcccacgtccctctccacgcgctaaactatatagcccccgcccgccaccacctttccctccagaattcaaaccggatcaacctcgctcgcttactcgtgtttaggcatggacgtttctgctgcgctcagcagcgactactcgtcggggacgccgtcgccggtggcggccgacgccgacgacggctcctccgcctacatgacggtgtcgtcggcgccgcccaagcggcgagcggggcggaccaagttcaaggagacgcggcaccccgtgttcaagggcgtgcgccggaggaaccccgggaggtgggtgtgcgaggtgcgcgagccgcacggcaagcagcggatatggctcgggacgttcgagacagcagagatggcggcgcgcgcgcacgacgtcgccgcgctcgcgctccgcggccgcgccgcctgcctcaacttcgccgactcgccgaggcgcctccgcgtcccgcccatcggcgcaagccacgacgacatacggagggcggcggctgaggcggccgaggcattccggccgccaccagatgagagcaatgcggccaccgaggtggcagccgccgcatcgggcgccactaattcgaacgccgaacagttcgcctcccacccgtactacgaggtcatggacgatgggctggacttggggatgcagggctatctcgacatggcgcaagggatgctcattgacccgcctccaatggccggtgatcctgccgtaggtagcggcgaagacgacaacgatggcgaggtccagctatggagctactgatcctgcgcgtttgaactcaacttggtttggcgcgaagagatcgcatgtacagcttaagggagtcgagtacaagtacctcaggtgtactccactcgttgcccctttcccttccctttcgtttttcttgagcttatctgcagggtaatgttatgtattgctgctcttctgatgaaatgtgatcggaagaagcggaaggccagatcgagcttatgggttctgaagacggtgaaggcttgtcgagtgttgtgagcatatattcagaaagtcaggcactgtgaaagtatgaatcagatcagccttgttacgaatgagagtgatcgaccttgttcagtgtttataattgaaccacttgtgtgtaataagcagcaaagccatgttgcttgcttgatctgactcttgggaatggtatatttctcaaagaatgcaggattgactactcagaatttgacattttgcagtgaaatgataggattgttaaattaacattggaggagaggcatgtgtatatatgttaagaaacattagtaatgatgagcctatgatacttcgatctgtagtggtttatgacgaattggaattctactcggttcacaaattcgtgagatcttgctcaaattttgagcatctcaagccggttcaaaatgagatccggaggtgcattctgaatagtgttctcaaattttattcgaacttagtgaaaaaaaacgtcttactgtggctcaaatttcacccgtcaatagagatttgttataaaccctgtcaatattgaggtgatacttaaccaaaaaacaaaaaataattattatcacctcataatttggattacccaaataaatatagtgcatgcacccaataaaataaaaatcttatggaggaaggatttaaataataggagctgttcagattgatgccatttttaaccataccattgttttttttacaaagttgtcaaaaaaaatgtccacatttagtttgttgatattatcaaaattttgacaggttttcatatgtatttatcaaagttaggcataaaactaaatgtatgcatatttttagtaattttataaaaaaaaagtatgatttgaaatagcattaatctgaacaaccctttacaaccggagtgcacattctatcagtgacagtgaacgcctcaatgttttttttttcttttctttttttgccaaactggtcacttctctaaaaaaatggacttctgaaatttctacatcacaaaacagttttgcaatccatgcctaggcatataatacgacccatagtctttgtctatcattaaaggcaatcttatttatacagtacgaagtaccttcgagctaaagctggcttaagaaaatcctatggaacattcttttgacagcgtcaatgaagctctttgtaaattttaggcctcaagctggcaagccgcgggaaaaggcggtcccagagtgaggtctcaggtcaggtcacctcgcgcgcgttgcgttgctggacaaggccacaacccacaaggccacaagccacacaactctcaccagacaccagtcgccactcgctaccaacggctttcgcggttttgccagctcgcgcactggctctctcgcgcgcgcatgcctttccgcctttttaccgggtccgtactccgtcgccgtcggctgccaaagaatcagaagcatccagtcctgtcgtcgtcagctcatcacgagaggatctagctagctagcaagactcggtccacggggaggagaaacatgatgcgtcgatggttccagccgccacggaatttagtagtagtactagtaggatttggtatgacagtaatatatggcaacatgtcatcgtgttatagcagtggtaatactgttagtacgtggctttacctgatagtaacgcgtatgtgtccgttacactttgttggcgtttgattctcttaaagacgaagataaacatttaagtatttcacataaaacggggtgataataatgtgtaattaattgagtttttattcttacaaacttaaaaaaatagattaatctgatattttagagcaacttttataaagaatgttttcgcacaaaatacactatttaacagtttgaaaaacgtgtcacgagtatccaaaattgtatcatctgtttgtagaagaaacggagtcagacagccccataaccaaaactattttttccccacaaaactgtttatataatttcagtatttccaaaaaatagtttaaaggctttggatgatagggacgagggcgttctctgttgtcatgtgcatgtataggtctattttgagtccgggcaaacttcaacataactatgatacaaaattttcatcagtaatttactcattaatattaaattttaatggagactagcaaaagtgcccgtgcgttgcaataggaagagtatagatcagaaaagtatgcaattaattaaaatataaatttgctgaaatatttggtatttttaagtaagtatgtgtataattaaataaatttacaagtaaagcaagtgtgagaaataaaatataagggttaaatttaattttttaaaattctccatgattagttacgctctttggaattttattggaattttcagagcttaattgctaattttaataatacaaaaatcatttaataattatttaattagaaaaagaaagaaaatccttccttttaagtttggttagaaataaacacattcaatcactataattgtaaatgcttctgaaaaaatgaagtactaaaaatgaacttcttttcttttacttcggcccgagggaccaaaaatagacttatttccagcccttgtcggtcggcccacggccttttgggtcgcgcgggagcacttcccctccccaggccgcaacctgggcttgggcctgaaaagtggcctcgctctcgatccctcttgggcctatttcagcccggacgacgccagccgtctgatctctagggttttgatcagacggccgagcgtcgagatcggggaaacaaaaccccatctctttcctctgccgccgaaaccctagcccatttccttccctcccttctctctcttcgccgccctcccctccgcgcccccgatgctctctccctctctcgaccttacccgagcggcggtggcggcgcccttccccccgaacggcggccttcctcccgcgagcgacgcccttccccccgagcggcggccttcctcccccggccggcggcggcggcacccaccctgaccaccggcggtggatctagcgggaggggaggcagcggtggcgctctctcccaccactgacggtggatctagaaggaggggagccgccggcggccaaccgtccttgcggcggcgacggtggggtgcggcggagacggcggaccgctcccgacaatggcatcggcggcattcgcgctccctcggcgacggccgtccctacggcagcgtcgactgcgacgacggcatgtgcggcgtacgcgggtagatccgtcagcggtggcggcaaccgcgggcggatccggcggcggtggtggcctcttctccctctggcgcagtggtcgcgggtggatctgacggtggtggcgtctactgagggtggatccaggaacggcggcttccttcgccgtctgtcttctccgtccggcgcggttgtggcggccgagggcggatccggcagcatgggagtgaacttctgttatgtatgttgtgattgttgttgttcttggatgatttcgttattgttgttgttcttggatgtggtgtatgttgttgttgttcttcttggatgattgtggttgattttggaggcaaatagtgattgattttttggggggcgacggacaaaatcggactgaaaaaggcagggtggttgattttttttttgggggcgatggacgaaatcggactgaaaaaaaatcacacggatggaccaatcggactgtgatgaccggaaaaataccaatatttatattagttatagatagatatagatttctccagcgagcccgagcactagccgggcagtggatccgctattgggtctactatccaattgctcaccatagttgatattttataactcgagggcactcacactaatatgtccttaaatattaagcagataattttaaaaaaaaccaaaatcaatgaatctgatataataggcatatatcatcttgcaaaatttcaattccaaagtcgattaaaaaataagaagaaaaaaaattaaattcagttatgaatgacaatacaaaactatttgtagctaaattcgcgccgcgagggggggaggggggcaagacgtgtacatttaattaaatttgttgttgtatatttgtggtgagacatacaagacataacattttaatcaatgaacccccttcgacttttcattctgaaattatttgtccaatgagaataagctccttttttttaacttttttagaccagcttttaacgtgttcgactatctcactatgtcttaccagatattgcacttgcacatgatgcacactgccttatcataggcatgcgtcgggtcctccaacatttcaaaggtgctcaacaataatttttctcaatatatgttgcaatttttgtttcttcgatgttctacatattggttgttggtggcgcaatcaattttgttgaatgttgcatctttttaaacatttttctccaagttatgaaacattatttttcaagcaacaaaacattgccctattttttttcttcaaatcggatggatgcccaatttattatttcgtcctagattaggtggcatacattgaattttctacaatggagaagacattttggttacttgttgacacttgggcttgggttcgatagtgagttggagtggattttttcacggcacacagaaacgagataagtcattagaacatgattaattaaacgttaattattacaaacttaaaaaatggtttatttgatttttaaataaacttttatataaaaagtttttgaaaaaatacactatttagtaatttagaaaacgtgctaacggaaaacaatagagttgtcacccctaaactcactgccgaacagggccttagcagttagcactatggtgcattctattagggtgaaaaattggataaaaatttgtccagctgtagataatgagaactgcctcaaaagtgtagcagatttaaaatctactaatgtcggatggcccaacacctactctgattttcaagaaaaaaaattaatcctctctaggatttaccacttttataatatctgtatgaatgagtcgttcaaaaaaataaaatctgtatgaataagaggcattcccttggccaatactacaatagtacagtctgttcttttccgtgcaagtttcgtcctgcaacattcatgcgtttcaccacgcattaagatctatacaaccaactgaaacaggcaagatcagcttggttcagtgatggagatggtggcgttcaagtaagcgatgcactcggtcggcaggctgaggaaggtgttcatgaagacgtcatcaatggggtcgacgacggccacccctaccagcttgcatctcccttcgccgtccatcctttctccagttcctcgtcttatggctccactggactcctcggaggtcagcgttgtgtcgacgaacagcggcggtgctcggtagatgcttccaaccgagaagcagaacctcgacctgaacttcagatcaacctgaaacgagcacgatcattcatgatcgtgattattcttacagcaatgtctctgctctgtttttctccagagattgttcagatgttctgcctgactgcttgcctgaagaaatctagagcacacatgcgcataactgtgacgagacaaccacatggatattacctgaccacttgttggatcgatgtttccgcggagagcctcgggcaagatgtcgatcttgaggaacggcggcagcggcagcccgaggaacttggtcgtcgcgccggacatcgccgggatgtacaggcttgacacgtcgaactcgaccagaaccgtgccactatcctcgccgctgctggcgacgacgccgacgccgcggccgccctgggcgttgtacgcgaagtccgggtacctggagatgcccagccggcacccgtcccgcgtccggaactcgacgctaaacgtgcctgcctgagcctcctgcggcgccgcgatggcagggctggatcgttgttcgccttgcccggtgcacgccaccgagacggcagcgttcttcttgcacgggcgatgcaggtgtctcggtggcgctccgaaagcacacggtttcttgggaattgagggtttttgctgggcccgaaggttcgacgaggtggtgctgatactgccgggcggagtcatttggaggcacgccggcagcacggccacggcggcgatggagaggatcagcagccggcgccggctgccggtttgaaggaggctgtgatttgtgtggctgtgccggtgtgcgatgggccacgacccacgatagacttatccatttcattttttggtttccattttttttctctttttctggatatgccctgaattcatcatttggttgatgaaattttttcatgaatcggagtgtcagaagcttgagtgttagatctgtctttgctgcatgctcaaacattttgtgccgactaagagccggggaataacaaatttaagttgacctataacacgtatttctttttgtttgatgcgaaacccgtatggtcaaagtagagaagtatatctattgactcgaactggagtacactcgtcatgcttagcacagagctgaaattccaagacttggtttgttttggatttggctaaggtcaaacatgagcgattcaacagtccaagccaatgatgcttagctggtcttttcggccgtccaacgctgcaagtcttcaaagccatacacacttgcatacacaagttgaagacttggaactcttgaattggctgctctatactactgggcgaaattagctgggccggttttgagcatcccacatagtttaggcctggttttatgcttgggactatttaaggtggaaatgcagctggtagaaatgcagtttgtgtgagtttgaagaagctagaaaaaccagtgactggcttctaatctattttctactattctatagttattacaagtttctcataatctggatgggacactttttttttttttttgagaattggacgggacactcttccaaacatacccttaaggttgttgctgcctgctgacgtgaaccgaacaaggtaagttttttcttgaggcccatcaagtgaaatgtctccttctcaaatagaccattctgaaagttcagcccaaaggactgcaatacgctgtgaataagttcattttggtcccttaacttgatagcaagttcgatttaaatccctgaaccgcagtaccagatacattgggtccctcaatgtcaaaaccagtgcaaataaaatcccaagatggtttggatgacggtctcggttgacatggcacctaggtggctagtttgacttagtccttgtcttacatgacggtaatgtgacactggaagaaaaatataaaaatttaaaatcaaaacaaaatgtggggcccacatgccaatcagacaaaagataaaaactagtgggaccttgtcaatgagtcccaccctctatctccgcggacaatggcgcgtcgttgcctccttctccttcttccctcctctcttctcgagttctcttgccggctagctactgccgtcaacgaccatagcaacgagagacattattgtcggcatcccaacgacgagatccatttgaggtagtgctcccgagggccagccaccgctccaaccgccaccgccactgccaccgccaccaatgcatgagggagagaggaagatggctgcgacgacaaggaggaaggctgcgacgacgagggattcgtgctccgaggcccagctgtggcggatccgctctccttaccatcactgtcaccttccctagacacaaccgccatcgttgagccgccgccaccgtcaccttcctgagctgcacccgccgtcgctaagatggatttgtagtgggagaaggcggggaggggggggagagaagggcagcggggcacggttgtggatggatggatttgtgccgataggaggtggagatgtgggcggtggaggcggctttcggatggtcagggtcgtgaagggtggaggatgacgagcaggagggatgcgtgaagaggggcttcttggccgactccggcgatttcttccgctgcatcaacacccgtttcgctggcactgcatccactgcacttcacaccttctcctccgatgtctcttctccatcccaccagtgttgactcttgcggctgacatgcgaggctcacatgggtcccccctgtctcagccggttgacaagtgggtcccacatggaccccatcttttttaaaattatttttttatgtaattgatatgtgggccccacatgttttactttttcctggatcaaagtgcgacgtaagcgccacgtcaatcccacataagacgaagacctagtaaaaaaggccacgtaggcaccacgtcagctaaagcccagggataatactcctgagggacctcatttacactggtttgtaagttagggacctgttgtatctgattttttggttgaaggacgaaattcggattcgttgtcaagttaaggggcctcaaatgaacttattcccgtcagaagccacatatataggccgcgtcctcacgcggtacgggccatgtagaactagaacccatctcagctcacccgcagtcgcgcgaccctgggaaaaaagggccacccatcagtgccttctcctctcctctctcttctcttctctctctccgatccggatcttcctacccactccggcgagccctcgccgcgtcgcctccacgcgactcgctcccgtatatcggcgcttcccttagccgctgccgccgcccgcctataccaccagctatatccgattgcctcctccccctttcgcgcctctgtcccgcgccccaccaaaccctaggcgcgccgcccatggacatagagaccgacggtcgcttcggcaacaagcgcgtgcaccaccgcctcggcccggccaacggcgccgcctcctcgtccacctccgggaaggtctgcatccactggcgcgccggccgatgcaatcgcttcccctgcccttacctccacagcgagctccccgaggcgacagccaagcgcccgagccaaagcggcggcggcgggaacgtctggaggaatccccactcaggaggtggagggggccgcggcgccggcggcgccgggggcccgaacaaatgggggaggggccccggaggtgcggatggtggcccgaggcacaaggtgcccgatcggccctgcaggtacttcctcgccggcgactgcagctacggggagaagtgccgataccctcactcctactccatgagcgatagcatcacgatgcttactccgctccagggccacgagaaggtgctcgcttcccagatcaatgcgctcgtctggtaaaaaaagaaaaaaaacctagcattctaactccaattgttgtgtattccatcaggttgtgacagggattgcactgccggctgggtcagacaagctgtattctgggagtaaggacggaactgtgcgcatgtgggattgccaaactgggcaggtagctgaggcatcattgaaatgtacccttcagaggctcttctgttctgtgtgacattactttatactatctgctatatggtcctgtgttagtgtgctggtgtcatcaatatgggacgtgagatcgggtgcatgatcagtgaggggccatggttatttgttgggattccagatgctgtgaaggtagggcgattagacctgagatttgtgactttgcttcagcactattggtgtaatggtgttcatgtgtgtgtctatctgcctgatctattggtacttggtataggtttggaatatgcaaacacaagcggaaatgaaccttactgggccaacggggcaagtctatgcactcgctgttggaaatgagctactctttgccgcaacacaagtaaacttcacattcattttgcttacgtttggtcctaacatttttattgtcgaatcattcactcgtgatgcccttggtgcaggatggacggattttggcctggagattcagcgctgcaacaaatggttttgaaccagctgcctctcttgttgggcaccagcttgctgtcgtttcattagtagtaggagccatgaggctttactctgcttcaatggacaaaacaattagagtaaggagaacttttgactcttggttcacacctattcatgtttactcttaaacagatacacttgctgttggaagctctgttgcatatataaacttccccacttaattgcatccatctgttatgtttccaattgttgaagttcacagtgtataattttgcattatcaatagatcttttatactgtgcatatacacttctagctttctctaataaatttaaatagtacatattgctaattgatttatcttcgggcaacaagcatacataagtaagttgtttcttatatattttctcagaataaatgcaatcaaagctgaggtacaaatctgcacctggtttaggctactacaggcgctgcaagcttgcatcataatttacttaggacatgcacttgcattattctactgttggttgacgtgcacattttgttgtgatatgtcaactggcacgaagaacatttgcaactagtattttggaaattactcatcagcagcactataaatcaccagtaccaagaattgctcctgttataaacttataatacatacaaatggtccctcgtggcatggtcccaatattattgaaaatctctatgttatatttgaatactggaatgttattttcatggtgcgatgattgtaagttttcctagtaattttggtcccttcaatcttaacatagcttgagttacctattctgttttgatgtacatgtattgtcgtatggattcatttttaagggatattatctacttatttccactttccgggaggtatttttgaggtataggttttcttagtgttaatcatggggtatatactcaatcctggttacaagtatggtgaaaatactcgttttgtttatcatcatatatttttctgcatatatgttttctttccattcgattgcacatacgtcgttccataagatgagaatgatgttctattcactttacaaatagtaatgacagaaggcataatatttcaggtgtgggatttggcaacactgcagtgcatacagactctttctgatcatacaggtgttgttatgtctgtattgtgttgggatcaattcctattatcatgttccttggatcaaacaataaaagttagtctctgtccttgactttatgttgtttaataattttgcagatatgtcttcacattccatatcttacccttttcattgcatttcacactcgttcattttgttcctgttcttctaacatcatatctgtaatcacgttttatcctttcagtgcattcatacttctacgctgtgtttctcttcaggtttgggcagctacagaaagtggaagcttggaagtaacatatacacacaaagaggagcatgtatgtgactcgatactcaatactcttaataagcgattgcacaggggttatgttctgttacaccctgatgtactaaatccttattatatttaatttgttcattttcacaaaaacatgttaccctttctggcgaacttctagacagtaccattttatggttttatgtaatgggtgtcatctcccgccctgtttattatggaatataaataatactgatcagtgatcctgtttatactcctttgaacttaccgttaggatttcctttacacttccccatgctaaatgttttacatacagattagcaatttgtctactattaagacagctattactccctccatctcaaaatataactattagagctggaccattgagcgaattggatcagttcactggttttgccagcacttcaacaacaattaaactggcaatttaatcatttcaacatttagatgtttatttgcatgctttatctagcttctatacaagttagtgcccttattacacaagagccgcaagctaccaaagttaatgaaggcactaggcactagttgggccactgaggtgcaatgagcacctagcctgcatgtcatggtatgactggtggcagagccagaagcgtaaaaaaatatttattggagggggctgataatactagttatgatatttcataaaagcaaaaataattagtgtgaattattagaaattgagggaggccgaatccctgcttgccctttcctgtctctgccccctgcgtatgacatcagaacttgatttgtgagttttctaatggctttgcctgccaccctttcctgctacagagccaatatttctgtagtgattcacatagccaatattcatgtagtgatttgcaggatacttcatgtaactgcctaaaatataaatgtgtttacaagcatcatctattagtaaaaatacatgttccttattatttgtaacacaagtaagtctggcgatgtatgccagattgaatgctttaaatggaagttaataaatccaatgaaatctgtacacaggtaaaatgacatgttatacgagtcatgtactataactacactaataccacattggtgtgctggcattttgaattttgaataatcacttctgttccgtcagtactagttccataagagtgtgtcctttcatggtcacacacttttgcctttgagaaaccaatcctttccattattaatatagtatggcatctgccttgcacaaaatttggaaacacgcatgccctttacttctgtcaaatttcttcatttcaatttccaatgctctgatggctttgttttatctgtagggagcacttgccctaagtggcatgcctgatgcacaatcaaaacctgtgctactatgttcactaaatgacaacactgtccgactatatgacctgccatcgtaagaaagttgtcttgctaagattattttgttttacttctgatgtttatctgaagtggctccttttgggtttgtaggttcagtgataggggcaggatattctcaaaacaggaaataagggcaatacaagttggtcctagtggtttattttttactggggatggaactggtgagctgaaggtgtggcaatgggttattgatggatcccagaccaaatgaatatagtgtactctagattagtttcccccctttatttggtgagggataaagaacacatgcataatgatttgagatgtggttggcggccagttctgtccttgcatgtcctaaatttattctccgagggtatgagattcaattggatcgccttgcagttagattacaagctaagtctcaccatggacgagagtttctgtcctggaatgagtttcacgtgagggcaataatttcttgtaatatgtaaagcactggaagtctggaaccaacaagtacatctgatcactgttacgatgtgctggtagttcagaggatgtatcaatataaaggttttgctcggctgcatttgtattaaggaactcaaattttcacagcaatacaattgtttgttgttctctctcggagcacggcattgttttcctcgagggcttttggggaacatatagaatttttcactatgtggtattttgatgactaggatgtacctgatctatagttcttttgaaggaatttagcacggcagatggcagcaagaatagcaacagagttttggatgatggacagttttcacagcaagaatgcaaaatttgaactaaattgtatgccttttgaaagcaatctgcacaggctttaactgtaaggtccatagttgagcttcatcttcctgataggcgaacactgtttgttgagccattgagatttactagatgaatatgcgcggcttgccgcgcccgtcaatgtgtacatagtattaattaaaagtaacttaatgagatacagtagcataaaatcaagtacgtgacacggttagtatcacaaacagggggagtatacatttttttaaaacaatagtaagaataattggttgtttgttacaaagacaacagttagttaaattcgtgaatgataatgcattcagtactgcgatgagtgaaataaagtagattcatgtgataaaagtaaaaaaaaaaaactatctacaataaccttcccaatgtacatactttacatattagattgcaaggcatattacaaaaagtgcttacagaaaggggaagaatgcccacttcaatctgcttacagaaaggggaaggatgcacactccaatctgtttcaacaaactaatggtacaacaatatggcgagtagctgattctctggaaaaaaactgccatagcctccaagatgttgctctaaggggaaaatccccaaaaaatgctatttacattgtattcctgcgcctctccatctgctatgtgttaaattaacacaggttaaactgttgtccgtccaattgatctcccagtgccatcagcacacatgacactggtctattttgcatgtgtgcagcaaggatgagtacgcttcttacaaaacattaaacgatcaatacatggtaaaaatccaaaaaacaaaataagaaaaaaaactgcattgtcagatgcagaagcctgccacaagttagtcaaaagaacagtattactgaaattgtgtgcacagttgttgaacatgtgaaagataggcagtacctcagcgcgtctcaataaagttgctagcacaacaatccattccttaaatttgacagaacacatgtgagcaacaaggaactcaacatcaagccgactttgaagagtatccatttgaagctgtcatcagaatatcaattataaatgagaacagagatccaaggcagataataatatcagcgagattgtgctagtatattgattgatcaggtattgagtgatttactcaagtaagcaccattctatttgttaaacaaacatccataattactaagcttgcccagattcgtaatcttatattatgagcagtcaattcagaacattatcaagctttgtaaaagtacaaactgcaggagaaaactgtagaaaactcgagaaaaataatccaagaccgcaaagtaggtgggagcttctttgtgcgcttgtagtagcggacgaggcggtggatcctgctctcaacaagaataagcctgaaacttgagtccttgtccttcctgttcctctccaaatgcttcctaatagcaacagccttcttgatcaggaagtacaggtcttccaggatcttcggtgcaagacctacccatcaatcaaacaacataaaccagcacacgaacgcatgaagcaatcaatagaagtgggagtgtcatagggtggggagatctcaccgtgggccttgaggatgtgaagaatcttgctactggcgatgctcttgacgagggggattccgtgctggtgacggagcacaacgccaatctgcgacgacatctgacccatcttcgcggccttcatgatcatctcctccacctacaatacgaaccaacccaacggtgtcagaatccgaaaatcccccaaatcgaatcggaagcgagagagagggaggagaaggcacccacattggaggcggcgttcttgagcaagctcgggggaatcctcttgcacggcagcgccgacgacgagatacccttcctgcacaccacaccacagcgcagccgccgccattagaccagagaggagaaaccagcaatacgttagattttttgtagcaaatcatttaatacaataaagctaatgtttaggacagggcatcaaaataaaattataacacatagttatcagtttatcagtagttaaactcagtcatttatcaaaattgtaataaagtatttcataagttaacctattgttcagtaaatcatatagggtaataatcaggacataaagacagtagaaataaatcactgaaggaaatcgatcagtcactatctatttgtattcaagattatatttcaagggttacaattccattatcaatggcgcaggtttttgccatgattatcaaagtataaaaccatataattgttgtattattcaataaatcttatttttaaatccgattttattactgtgtcactaatttcagaaattagataatatcaacattcaaacatatatatatggttctgatcattctagtgtgctactgattccagtatttcagttacttttatatgctagcatatacaaggacttaatcatgttagtgcaacttttttttattatcctttctaatttcagtactgcacttgcatcagaattatgagcattcatttatccattcatagcatataggcatcaactaaataaaatcactacaaccaacagagaccatgagcacaggacatcaccaagttgagtattagcgctagtccataattatccccaatgcatcacagttcacagcacaacatcatacaagagagaacaccacacaaaacatcatcataagaatgatatagggaaggaagagtttactcatcaatggggataggatgtagccgcaggagttctgtggtggttggcaccagtcatctccacgggcagcagcggcaattggagaggcggggcaacggctaggatgagagagagggaggatcaggggaagagagaaaggaagagaagaagagagggagaagcaggggaatagaggaaggaaggggataggaagaagcggaaccagggacaggcagcaccggccatctcggctgcggctgcggcggcatggcagggagtcgagcatccaggaacaattggccaagggaatcagagagtaggaagtagaagagaagattaggggtcgcacccgtagtggaggcctggaaaccttcctagagaccatacctcgccgtagtttggccggcggcggcacctcgtgttgaggaaatcgtgcgttaccacgggctcttggcagtagcggctgccggagggcgaccggagttggaatccagtagccggcgtgaggaagcgcggtggcgttggcgccacaccggccacgatgccgccggagaaggaggcggcgttgacgcggccgccgtgccgtgctccatgccggggaggcgacggtgacatcaccaccactgcaccccactccttgccttccctcgccatccttacttcgcgtggccggcctctccccgctagctctgacgggcggcagtggcgcggtgcccgtgtgcggccggatgcgcagccgccacaagccccattgccggcgggtggggtggggggagaacaagtggggagggaggtgttgcggggaaggcggatgatggtgccgcacccgtcggcctccgccgcttcgtcgtccgaagctatcgcggccatcctactccgtcgtgccgtctcctccggccgccagatccggcggcagcggagctggatccagccgcgggagggccggatctgactacggcggcaccggagacgaggccacgagccgcgccgtcgcacggcctgcaaggagaggcaacggatagcgaggggaggacggacgacgtcggcggcggcgggtggagggcggacgacgacggaggtgactgggggagggcggatggaggcggggggagtcccgcgccggcgccggcgccgagcacggggcgcggggcgtgggtggggcggcggccgcgcggtgggggagtggggaacagcccgtggttagggtctggggtatatgtggtcgtttttcggataaaccccttcgttttttatttttacagagctacccctaaaacggaattttctcttcttcacattgtatatttgtgaaaaacgagggttttttcgcaacaaacacaacggggtgtgaccagtccaaggatgtatacgatatttcgtggaaatacaaggacttttttgcaaaatatccttttaatcaaaccagctccaacccgccgtaaagaccggcgcgtgcgcacgtccccacagcgcccaaaaaaaaactttggactggagcggtcacgaaggcgcgcgcgaggagccgggatgaggaggagcgacgtgtaaatcatcggatagccaaaaaaatttcaaaaatcggagaaaaatagtacggttagaggagttattgattgatgattccagtgatacacctatccacagggaaatatagggaaggaagatgacaataagaaggaatgatagaggaaaggggaaaggattctgatcagaatcacttttagaacccactaatatggttttgtacctatccacagggatggcaataagaaggatcagaatcacttaagagtccaccaataaatccaaaatttcaaaccctaattacaaaataacaataaactgaactcacagcagttgctgggcgtgggctgttgtaggcatctgttagactgttactacaaaggatgcgatattaaatttaagtattctatataagttacatccactaaacatctagtaaatcacagcatgtaaatatagtgattattagagcaggtataatagcagactactccactagccagttacaaatatatctatctattatattattaaaacagttttgaaaggagacaccactttcgctgtgggggctagaaattcccacattaattagagaaaaagagaaaaatctacaccattgaattatgatagatcaataatttaaccattgagattgatcggacagatataagagtccgggtccgattcagactcaagtcccaaccggacaaggctgacaactaacacgatttcagttttttatcagagaagcccgctaaacaaaaaatcaatcctcttgattggcaatcttcccgctacatacagcaatggcacatataattaataatacatccaaatattatataagaagatctagaaattaccaaattaaataagtagtaaaaagaaaaagaaaaaatctgcaccaatttgttttgaacgaacaatctgcaccaattcatggtggacatatgttgtaacggttgacaataattgcccagaaataagtaccgggcaaatcctactcacaagctgtaaaaatactaaaaaattataaaagtacccgagaacaaaaacaagaatctatctatgcgacgctctttttttaaatagtatttggtcatttttaaaaaaatccacattaattgtattaagtatgaatataatttataaataactgaaatttaagataaaaaataaaataaatacgaaattataaaaagaaaaataaaagttcaaatatgaataaatttataatagctgaaatctgaaataaaaattatcacattaattggaggaaaaaatagagttaaagtaggaatacaattttttaaaataactaaaattcaaaataaaaataagcaaatatttaactaacagtctatctagggcataacatgagattaattaaattcgaaatgaaaaataaaataaaattcaaattagaaaaacaataaaaattcaagtatctaaagaaagcccatgttccctcgatgaagttcaattgctttgacgagtgagtctgatataaagaattgacaagcggattatacgtatgtaaacagccttcccgcctggcttgaatgaggagtggaaggacccgacctctagcactttacttttactgcctgcgcggctaaggaaagacaactacacttccaagtcctaagagaatactagtatacgattgttatataaataggtaaatgttcctttccattatgaatcgcgattgtatggccaaccaaataccattaaaaataactagaattagaaagaaaactaccatatagaataaaataaaaaaaatgaattctatcgtattactattaagcagggttttaaatctcccgctatagctatttgagatatttgctcttatatacaatttagccgctatagctctatttagcccgctatagctgtcgctatagttatttgagaagctaatcgctaaatgtcttagcctgctatttaaaacattgctattaagaggacaagacgagggtggcaaaggaactgggcaatgacggctagcgagacttctacaaactataaaaagaaaaccaaagaatgattaggttatatttttaaaatccaaataatcaagggttctaataggaatagaatttataaataattaaaattcgaaatagaaaataaagcatattgaaagaatagtccagatagggtagaacacaagattaattaaataaatctaatgataatcacgtttgattttaaatctcaatgacactaaatagggggggcagcgagcgagccgtagaatacagtgccaaagtcgatgattgtttggcgggacttctagaaagaaaaaaaataaacccaaatgatgattattgatttttaaaaacaaataactataaatagaggagacattggacgggctatagaggagtataatggaagcgtttgacgggacttctgaaaattataaaaatgaaactcattgagacaacaaactataaaaactacgatgtccaatttttaaaggttcgagacttctaaaaagtaaggaagaataatgataatcatgtttgattttatatctcaataacaataaagaggggaggcagcaggtgagccgtacgggacttctgaaaaataaaaaaaaagaacccaaacgatgattatattcgatttataaaatcccaacgacaataaagagaggaggtagcgaacgaaccgtagacgagtatagtggcagcgtttgatgagacttccaaaaattataaaagcaaaacccaacgagacaataaactcaaaaaactataaggcccaattttaaaggttccaaggagaatgaataaaaacagtggtaaattaagcaagcaaataaaaaaggggtaacatcagtaaggagtagcaactggtgtgacttttataatctataaaagtagaaacaatgggttgataaggtttgaccttttaaagtcttaagacaactagatagttatttaataaatataaagtaaaatcatattaaaaaataaatattttgtatgggtgctagccgcgcaattgcgcaggccaccctgctagttttaatgagataaaagatgagagagaagagcagcggactacagatctatagctagctgcagcacggacttcaagacgcaatgtgtgtatgataagttggaccatatactaatagtatagtaagcaattattgtataaattggctattagattggttatagatgtattgaagctagcagtgtgctatactattaaacttgctcttaaagccgtctgctgcacaaccagcgcggcaccgatttttttaaatatgagcaaaacaaaaaaatatatttttttatgtaaacactgaggtattggatttttattcataagcaggacaacgtaattctgcatcatcccattaaaacaatcggacgccaccgatctagagcgtccggccttctcacggacgcgatattctcattgcgtccatagcccacgggccaaagggctctaaaaacagtatccctgttcttctgcatcctatcaccgtaaaatccccaatctgaaaacccacgagtaaaccagcggccacaaaccttagcggcgtggcggcggtggcggcggcggtacccatcccgttatttttcttgatcgagtcttaaggtatcgagcttgccgtcgtcgtcagttctaagtacgcacccacgcgactggctctcagccatcaggttagtcgtcttacacggccatgtattagttaattgcatgatgagctcttttggttttttcattggagactaaatcgttgtgcggcattctctttctttagtgatacattatagtgctgctgcattaagcattagttgttaatttttgtgcttatctttataagacaatgacagattagttattagcaaatagcaacaggcatcctaccttcctaacaagctttgtaagctagtttccgtcaacataacaatgcgactataaggaaacaaaagggtgcaaataatctagaaattagttttacttttgatcaatcatcttacgatgcttgtttataagttcctgaaaaagaaatcagttgtacgttgtttgacatgcttccttaattttttgtatgctacaaactagtaagatgaggactaatcaagatgggttaggtcggtcaattacaataagtgatgaggagataggcttactggatggagatcaaactttagttcagcaaactgaactaaatgtttcagaacgtttcagtgccttactatggatgcctcattgccagcacaaaatctcaaaagtttggaaaaatgtaagctattgctagcttctgtcatatacctttccaaaaaaaatgattggactaatttgtatcctacgtatgcaggctaatgatggtgttagtgtcaggtatcaccacgtgggcattccataccattatttatgtgaaccactgtcacgcccagaaatttaacccaaatttccagactattttgcgtattaaatccctgtccaggaccagccagggtacacaaaacgacaagtaatatacagttccaaacgtaaataaagcgtaaaatacttacggaagaggcacttagtcctcacaccgaaatagaacgacagcagcggaaaaaggcgatcctagcggggcttcagctccactccacaggcaaaactcaactggggtctgagccttggtcctctaactccatcttcagctcagaagcactacacttctgaaaagggggaataatagcaagactgagtacaaccaccatactcagcaagccacaccaacgatgcagatgtgcaaggggatacaaggatggtttgtggctatttgcataaaggcggttgtaaaacattttattgagcaaaacagtaaaactgttgagtaattaaagtaacattaaatctccactgatcaacgctacaccacgttgaacaggcccaaccaacccacctgaactacagtgtattgggtcgatttattaagatgggactaatcacggtgaatctggtcgaccgcccataaccgtgggctcggctattcgaatagttttactctgatcagaggtgtacaactgtacccacaagacacagccccacgacacgtttccgtgcgccgacatgccaccacgacataccggaaagaggccgtgacaggacccttcgcataaccccctctaaccgatcgcaccacaccttagggttcgcccccgtccccagcaggcaacgggcagcccccctttcgtgccgcggtgaatccggaagccgatcaaccggacaccccggccgacctaactccatcacgcccaccctcgcctgggtacgtcggctagagaaaagctacactacaagcccagccgttgcccacgctggcttgtggtaagtacgataagttcttccagggcatcccgcgaaccggtccttaattgccatggggtgcgactagcaaaatcatgcacccacagcccaccatgtagtcgcattttagttggataattatgaccatgaagcatggccaggtgtctcgagcacgcagctcattctgctactaaaaaggtctaatattgtaattatcccatcaactgagctagtgttatttaagcagggctaagcatatagttctagctaggtcacataagtaacatgagctagtcaatttattacccacggttgacaaagggcagatatcaagtaaacatggcacaagcgagcagataggtaatacctgaatcccatgtaattaacaaaacatgcatatttatttgtaaacggtaaaacatttataaattaggatcaacatgctcaaggggaatgtgtgacttgccttgcttcttcaaacaatcttacaaactcttatccttgcgaccgcgaacttccgaaacgacggattctacacgctggcacgcaaaacgaggaaaaaatctaataaagaccaagcaaacagtacataaaaagtaaacaaacatgtagagctcaattttagatgaattttgcaagttgaacggctcaattcggagttcgaatgaattagatatgaattttagaagttttgagccatttaaatgaatttctataattattcacgaattattgcgcaattattatttattttctcaaaggaaaaggctgtgctgacttcagcaaagggccggcgccgacaggcgggccccactcgtcagtggcacaaggggcaagcacacggtggactcgatccaccgcggccgaggcggcaccgtggacccggaccacggaagtggtccacgggaccgacggcctggatcggcccaaagccgatccaacggccacggccggcgcggctggggcaaggcacggctcaaagccggcaggccaaacgacggcgcgcggcggcgcggccacccgcggcgatggccggcgacagctcacgcgggcgaaagcggcgcacgcgagagagcagcagcgcggcgcggcaagggggaggtggcaaccggctgcccggcaccatcggcaacggcgcgggcacgtagcgcggagcgcggcggcagcgacccggtcggatggccaccggcggcggcagcgcgtcgcgaggacgcccgggaggcggccgacgaaggggaggaaaagggagagggaggggagtgctcaccgagatgcacgacggcgaaggggcggccgacggcaaggaacggtggcggcggggctcctcaggaagacgacgcgacggagctccggcgacgggcgtcgctcgggatggggcggacgggctcggcctcgatcggccaccgaggaaggaggagctccgatggatttccggcgaagaggggtggcagccgaggtcctcctcgtccttgcggagctgagggaggcaacggcgcgggtcggcgtcgaccgaagcggcggcgcgacgcggctggagtcggcggcggcggagagaggtggttcgcgtggctacggcgctacggaggtggagaggggaaatggagcggtggccgagcttgcccgggcggcggcaaagctggcggtggcggcggcgcagcgcggagacggaggcggcggctgaggcacgcggctggagaacgccggcgagcggcggcgatggggaccggcgtggggagagcggggaaaagcgcagggagctcggggtggagtgggaaacgaaagaggggagcacgagggtgctttatatagggctcggggatggagatcgtgcccgggagaggcgggatcggccggcgacgtggggaggcgaagtggagctcgggatggcaacggttttcgcggggcgtgggggaaacggcgcggacgtgggcggtgaccgcgcccacgcatgcgcgggagagggaaccgcgcgaggaaggcggcgacgtggggagcacggggcggccatggcggcggttgtgcccggcgtgaggaaggggatgggcctgacaagtgggtcccgtggtcccacttgtcggcctaagggagagagaaagggcgaggggggaggttatgtagatttttcaagggagagagcgagcgggccgagcggatgggaggcaggaggccggcccagatagagagaagaggggagggggattcggccgggcccaagggggggaggggagggattttatttgtttttcatttaatttaattggtttaaatgaactttgtattattataattacttcttgagctccgaaaattcgcgggaaatttcagagagtattttagggcacaaagaatactacaaaatattcccggccaatgatttttaaagggaaaattttaattctcccaataattcacttggataaattgcttaactttttatttaatttctaggaaatgcattattaaatgatttttaattctgaacgaaaatcggggcgttacaaccactactgaagagacttggattctatcaagtttcccagatggttgggatgagtgttgatagatttctaattggagcattagtagagagatggcagcctgagactaacacatttcacttaccagttggagagatgacaattagcctacaagatgtgagttgtctatggggcttaccaattcaatgtgagcctattataggcaagtcagaggggccatgggttgatgaaattgagacattactaggagttactccaggaaaacaagtgatgaagcaaaaaaagcgaaaggcggacggtgacttggaaagcgggggaaagatgacatcttctaactactccatcagcttaaagaaattatgagatcagttcaaggagatgccagaaaatgcaacaaaagaacaaattgaacattacaccagggcattcattttggatattcttgggtcaatgattttcccggatacattaggagatggagtgactgcaatgtacctgcaattccttcaggatcttgataaaccaaaggagtacaactggggggcagcaactcttgctgtgctttatagacaattaagcttcggtgcagaatgagagagattggagatggctggtccattagtgcttctgcagcattggtgtgggtcgcggttgagaccaggacgaccagtggatcaagataggaaccctattagttggggagagccagaccctgagagttgtcctacatttggagcaaaatggtgtggccaggaactttatcctctgccacataactcgggtgttgcgttttatcggaacttgctggatcaagttcaagacaatgaggtctcttgggaatcatataatggactattgatgtccatgccaagaagagttagagctgaacgtgctttctggtatagtcgagtacctctcatccatttttggatcattgaatttcattatccagatagagtgatgagacaactagggagaaagcaaaccattccacctcctcccccacatgatgagagcaagcttcgtcaactccataaaataaatcatacagggaaaccacgtgattggaggaagctccacgcagaatatgttaaccaatacaatagagtttggcaaagcatggttgatgaggagcaacattttgaccaggcaagttttgccacaatatcgtcattggtttcaacagtatgggatgtacactgttttttggatgcttggtccgctcaaggtttgcgggatcccatcccttatccactggataacttcgattggaccggttacatgcccagtggtccacctctctcccgattggtatactaacatttctttacttgttcttttttacttgcaataattcacttaataacacttcttttttcttaaaatgctaatttaggctctacgttctatcaaacaagttgcgtggggaattaaatgtgctatgagcagaggatggagaaagatgggcaagattcttatctgtacatgttacaataacgtccaggatatcaatatggaggctaagttaagcagcatgctaagcgagtcaggtctacctttatgtgtagatgacattcgatctgatgatagtgcatcaccattttctacccctaaaccaattaaacctgaggagataaacatggatgtgatggatgactggttgtactcaaacaggggatttacaagataccttagtttaggtacatattctgatgtgctggaatctcaggataaacattgagcatagatcagggcaaagagctttttgttactcctgctgttagacaatgttattatttggttgatcaaagcttgtgattttctttgtttatctgtaagttctataaattagaatctattttttttacatacatatggtttaacctgtatcttgtatttcctgttcaacgtatcaaaaaaaaaaacctcctgccatttccattcaaatcacattgagcgaaataagacaagcagtgttgtccttgtcaagatacaaaaataacaagtaattgtcaatagggaactttaaaaatatcatgcttgttaaatgagaatgaagtccttactcacagaaaactaaatccaaattttataatataagctagaagtagatttgctagataaatttctagggcgatgcagcggagtccatcctatggattgtatcacccttgatgttggtgagatggcacccctgcagtgttaattctatattagtaggaagcatagatatatcgtacaataattaaattatgacagaccggcttgatttttatcttgggttgaatgacgtgcttgatgtcctaagcgtcgaccttgcatttcatccatatacattggaattcggttatatcttcgtcgacccaactgtatcaacctagcatcaggctcaataattggccactccgattgatttccatatgggtggaactgaccagcccaagtgtttgcgagtgttgtagaagagtagtaaggatggataaactaattctcattaaggtttctatctttgcaaacagcaagcacatgagcacaaggaatactagtaaggttgggcttttggcactcacatgtcggaatagcattgttgcacataactagcttatacttgaaatccccttgaacatacacaacacgatctccttgatgcaatgcaactcgttcacggtcaaccttcacctcatattctcctctttcatcaccatatgatataacatgcatggatccggccttggcccctcgtttcactaataacttctcaacccgtcgagaccacattttccctgagtttgcaagatcaagagaagatcttcttctatcaacaaaccattctaagcacttgttaaatgtttcctccactattgccatgactggtaatctccttgagtacttgaacacattatttagagactcggagccattacttgtcattatccctcatcgatgtccaccatccatgcactggaaaaccttttcagatttttccggctcattcttatcttcttgccgatattttcccaccttaccaagataagcaattgcatctggacaagtttttgaaatagcttccataccttcattgaatctacgtggtttcttcttcttgacaacccacttaaaagtttttaccacatcatcatctttacattgcttgtaaagattctcagcaatatgttgtgaacaaaatcgatgcacacactcaccatcactttcattccatccaatatgtggctgcttgaacacccatttgatagctttgtggcgatcagaaataacacacacaaatttaccaaaaccaataacctctttccgcaaccatctcatgaaccattcccaattatcactgtcttccttctccactattgcaaatgcaagaggtaataatttgttttcagcatcatatccacatgctatcaacaacctacctcggtatcttccatacaaaaaggaagcatctatactaatgacaggtcgaagataaggtactgcttcaatacaaggtccaaaagcccaagccacgcacttgaatgctcgatgcccttcacgagtcatcggttgtgacaaaatttgatatcttgttccaggattagttgctttaatagcctccaataatggagtgagcagtgcatatgatccttcccaacttccgaaaagttgagcaattactaacttccggccacgccataacttgttgtagtgtggctttacatttttataccgttgccgaactaattgccatatgttcattatgctcaactccaagttctctttcaagtcatcacgtataacatctgcaataactgcagatgtcaattgtgcatgatcaagtcgatcagcgggagctcgacatgtgtgaggataggggcaagtctgtatcttccaacttgaaccaatttttgttggtttcccatatagcttccacaagcaagtattgtctatgcacttcatacttagtcttgacttgttacttgtggtaacctttacttcttgattggtactaatgtgaaattcattaatagcaaactgcaaatgctccttggaatcaaaagttcggcctttagctaatggactgttaaaatgtttcctcgaaccaaagaatctctcatcggccgttgtattctgtagcacagatatatcatggaaggcacttacagggtgcttgtcagacctgcccacgagtggcaacaatttgatcaatttgaccacaggctgaccataggtgttatcattcacatcctcttcggcttcgccatcgctctcatcctcctcaatcatatcaccctcacgttctgtctcttcatccacatagccatcatcttgagaattttcttgcgcttcatttatgatattatcagaagacaagcccacaattggtgcataattactcacatcatgaattttaggagatataccatgcttaggcgactgatgtgatgctgacacaatattctcagcaactgtagccatagttggttctaggttttctcttgttatttcactaacaatgtggttttggctgaatccactatttgttggagtgaactcaatgtataattccaccatacgccaactgttccgtgctgatgtcatgtcaaaaatcatttgccatgatctggtctcatataatgggatcaactggaaaaaatatggccctggtgctcctacatcatatcggccttgtataacaagtgaatattcagtttcagaatattttagccctccataaatctcattctttacatcttcgaaagttgtagcttcggaagcaggaaaagtaatcttgggtggaatgctatactctgcaccagtcgctccatatacaatttcacgtccagtgtatacaagaacaattatcatggtctgatgacctaatagtaataaagaaaagaaaaatatatatcaatttccatattcgatttattcatgatcagaatatttagtatatacatggcacaaagcactactaacgtggagcacatagctaatgatgatataatcgtttcatgcagtaatttactcatactttcgattagcagtgccgcaacctttccaggatagaagaataaaatgatacaacagatctgctagttttttttagggggaaaaactgatatattactcagctacggcctcattcacaaaatgtgagatgagattacaagaaccatctggctagaactcggagagatatgctacttgactagtactaatgtctaatcaattccaaacaacgaaaagtaaacataccttgcaaataatcttacgcgtgatctctgcttaaactctgatctcatctgatataagactagggcatgacttctgcagtaagggaaggttagggatagaaagaaagacactaaccaatgcgtatatccgtatttcttttctacgttgcgggcgtgcagttgctcggcggaggccgctgttaagttttggcgtccaggttctgtccagggacgcagtaaaaaccttgcgtccaaattagtcgcagccaaatgatagcgtccctatcaaacagatggacgctacttgaccagaacgtcctgcttattaatagaattagatggttgtggtgcttacataaaaaaatatatttcttattttgctcagaattaaaaaaatcggagcgcggcagctcggcaacccaagcccacctcagctgtgccacgcgcagacatctcgccacacagcagccagaatcgctggcagccaacgattccctccactgtggtctccgtgccatactcgcgatttgcaggtgatggcacaccattattagcttatgattggaggatcatagagtggcagcagctgattctagagagggccaggatctgcttcagccctgctcgcaaatcttgtgtggggtgtggggaaaaagtttggaaaggaaccgcaacggtaggagaaaaaggcggtccggcgatcattgtatgtaatgacgataaaattgatgatgatgaatgctcactcccttctaaatcaatgcaactttacattttgtccttacatcgtgtgtctcacaagccacatcggctcccaactgggagagatgtcgtggcgaaaaatcaagcgtgactcgtgataggaatactccagttctgaaaaaaaatcgtgataggaatcgccaccaacgagcaagttgaccacttcctaactctgtctaggcagctagtgttgctagaacagtgatatcgacacaaggccaatcctatcgggcagagtgtgagatgctcgggctttgattatcctaagagcaaaatagtatagccaattgtgagtttataatcaacttaatagtcaattcatacaatagccacctataaacatatatactacattactaatatctagtcctacctatcatacacatgtgcattttggagtccgtattgcagcttgctacaaatctgtagtccgtattcttctctctcatcttttattcttttatttttttaaaatatgtttatagcttgcttatagtatgttaatgtatctgctctaattactggagtagtgctccaatattgcacgggagtatctcaccccaagcacacacacgtagtaactgtgaccgtgtccgtgatacggaccgtacttctgggattccgggcctagtggaagaaaggagtactccatagtatgggcccgtttagttctaaaaacatcatatcgaatctccatatacatatatggagtattaaatataaataaaaagaaaaattaattgcacagttataggggaaatagcaagacgaatcttttgagcctaattagcccgtgattatctataagtgctacagtaacccacatatgctaatgacggtttaattaggctcaaaagattcgtctcgcggtttcccgacgagttctaaaattagtttttttattcgtgtccgaaaacccctttcgacatccagtcaaacgtccgatgtgacacataaaaattttcttttcctcaactaaacacacccaggcgtgagctacggccgaatgctcctcgcgttttaacctttgcgatgattcttccagcactttccaaatccacgacggcgatgttcagaaaggcgagagaatatccgttggtacatgccgtattgcactgcatggagcagcagcagcagccagatttttggagtttttactgttgcgaccatgtgcaccgataccacgagaacacttgtacgtggcaattcgctcatgagcttgggagcgcttcccgtgaaaggtaatactgaggggccaaatgtctgaactagaaactcactattacagaaatatttttttatgcggctagaacatttttttttggaggtagcgaccgtctagtgtttgtaaaagtaataatttgttcgtaggcagacagtataaccacatgtaaaagaagagatttttgcaagcaggcatgttaggccgtcggcctgaaaaaattaaaaaaaaatccaaagccgaccagatacatgcccgagggagaggagttggcgagatctgcacgggaggggagagcgatccgccgccaccgaactccccaccactagatcctccgccgccgagcttcctaccgccggatcccctagtcaccgcccgctcccgctcagcgtcggaggaagtggagaagaggaggtggagcggagaggatgaggagaggagagttggtggaggagcagagaggtggaaaggagaggaagtggaggagaggagatgaagcggagaggatgaggatgatgagagagagggaacttagatatttttctggatcaatattaattattgaaggtaaatggcattatggtctgcctagaaatgggtgggaggctcatctgtaaaaatcgattatgtagtagtggctatggtcaagtatggaaatgaactcaaattggttcgtcttatgcacatatcggctaaattaccgatatatactcctaagtgattaagaaaaaagtaactaatatccaaattacaaatcatagtactggatggaggacggggggcaccatgaatccgtttaggcacaatgaagcttcgcccctggtaacctgtaacccttggtccgaaaacagcttctttaacataaagtcagagagacgtgagtccctaacaggtggacctacacttataggctcacaagtcagcgacacacttccctctaacttacgttaaaggagcctcgtcccccttgcctacttcaattgagagaactaactattaacttttattttatttatttaaatgtaaagttaaattaatctgggtgaactattatagaccaaggatttaggggttcagctacatatttttaggagggtgtttagtaacttggcctagagtttttttttctagctacatatcgtttatttttatcatatatgtatctccttagtctaaactcaagcactcgcatagcctaaactcgatccaatgcaaagtaaagcaaaccagtaatacttcatccatttcattttagctctaccactataaagattatgagatcgaaccacacctatctatatttgtagtagcctacacatattctcatcatacaccatattttataatacttttttcaaaaagatagtggaaaatttcatttaacaatgaaaacattcaacctctacatcaagctaaaaaactagataacacgaccatattatattgccttgtgacaggttacaccactacaactatctaggaagaatctcaaagtctatgaagcactcctcgtaacaacacttctaagaagaattcgtcatttgtctaccgatatcatgttgatcgatttaaagtctgtgatagatttgcattcagagttagctatgagataaaacctcatttgaactggggtggggagagggttgttattatagtcttttttagaaaaaatcttatttttaaaaaggctctataaatgcttatatttgtgaacagatgaaataattatggtgaaaatatttcagatcactcatatctaccacagtagcctttatctaaaaaatatctagagcggtagtgatgttattcacttaacgtatgcaacacaaatgacagtatattgatctggacaatggtaacggatctgccatgggagcggtaggggctcgagaccctcactggtggagaaacctttttactcccgattggtaaccctccttagtcccggatttccaaccggaagtaggaatctgggactaaagatatccatctttaatccggttgaaataaccgggactaaagatccatctttagtcccggttgataacaacaattagtcccggttgttgttatcaaccgggactaaatagagggtagcgggcagtccagatagtccctttttttttctccttaatcaagtggcatgcacatcctgaaatcaaaccccaaatcaaagtaacatcacaaatcttaaagttactcatacacacaaatcaaatacatcacaaatcctaaaaaaaatacaaaacaaatctaatatatcacagattatacatttcagatctatacaaatgtacaatgaataataaaattatacatctcaatgaatcacatattatatacataaaaagaaaacaaagccggctgcctccgctcgccacggccgacgcctacggccccgttggccgccggccgcctgcccgccgccgctgggcgcggcccttccagccgccgccacgcgcggccacctcggccccaggccgcctgctcggcgccgcccggcacggccaccgtctgtctgctcgccgccgtcgggcacgccccccccccccccggccacaggccgcctgctcggcgccgcctggcacgaccaccgcccgcctgcccgccgccaccgggcccgcccccccggccacaggccacctgctcggcgctggccacctgtcggccgccggatgggaggggaggagggggagtagaggggaggaggaggcttggatcggatctgagggagttagagaggggcgattgataacagtaaaatttggtaatcggcaaagacgtcatcggcttagaatcattatcggctgcagcatctcgaaatcagccaatgggagttatcaagtcgccaatagtcgggttcctactatattcggttaaggaaatcaatctactaaaggaagcttatccctaagtgaccgagtttaaagagaatgtggcatggcagtttatctattaattaggaatagtttgttagtttccttttatctttaggttagtttctttcttatccgacaaggacttgtatcaacccatgggtataaatatgtacacccggggtctatgtaatctatctccacgatcaatacaattcggtgcatcgccaccttttaccttttctactttattttacgttccggcagaacttggcacccgacgcggggctgcatcgtcttcgatctccggcgaagggataagtctaatgttccgccggcccaggcaattgtatcgtttacgtcggcgtcgttcaaggctacatcagtacattcgacctcttggattgctctggtttggatgatatacttgcctacctatttatcatatgtctctgttaatctaatcttagcatatcaatttagctctattggctgcttctcgttttagggtttctgtcggtatcggttaaatcgcgttgctagattagattagcttagacatctaccaccctgaaaactcagtcaatggcttgattgtctagatattatgtttcttttcatacttagtgctgcatcagttaagtttgatctactaagtcgtgcttagaaccataatctctagcctgcttcttgattgccaataagggtttcatcggggttttagccggtgagttatctggacgttgcatcggctcataaggattgcatatacatataagttggatttagccgatgacaacaaaggcttcactgtttaatctaatcttgtggatttcatgacatcagacctccagccgatgtgtgctttgaccttcggatcgatgcttatttatcatatcattatttgctgattggtttatactggaatatattgttatttcattacatggtcatcagccgattgcctttatatcattatctacattggacatatagccgattgcttaaccctatcgctatcggctggtattagcatcggctattatcggctatcggctggaactacaccatcggcttgtcagccgatttgctgttttgatctactatttgcatatcttgtcagttgcaggattaaactgactggcacgcccgtatctcattaatctttggacctgcacaggagctaagcagatctcccaggtcggtgtgttcgattttttcatcaacagcgatatccgaggggggttggagagggacgatcttatctctaaatatttcgtctgagacttaatctatcagagatgggagagaaatatttactcccagttggagttaccaactgggactaaaaaaacattttagtcctggtttgtagtaccaaccgggactaaaaacaatctttagtcttggtttttattagaatgagactattgtgaaaatcagccgacccagcaaagatcatttctccagtagtacccagtgctgagactatgagagtccccatcaagtctccaaatttttctgcatatattcataaaaagatgggcggcatttttgtgtagtttgttcaaccacccctactatttctaaattttctactatttcttttttattcttcccgtgggcaagaacttttttagtttaaaaatgatgcgtgagctcaatatatttcttcataaccatatgttggaatacaacgtagtactacttcatagcaatttgataatctttagtgatctggcacagaatatgagattattgctggctggataacaaggaacaaggtcgattcgccacattcagaaaatatgagaggacagcacaaaaagtattctgttcttaaagacagaaggtgcagacaagtaagcgatgtccacttatatcatgcctagaatttgattgaacacactattttagtggtagtgggtgaattactttgtggaccctgccatcatcgtctatatatcaataacagccgaagaaaagtagtgtgaagcattagccttttggattaaggtgagcattcgttttggattattatagccttttgctttagtatttgggtaccaagttttgtataaaaaaatgataattcttgagatttttttacggatgataaaattaccctttacttaaccactgatatttttccatggagaaacaaactacgaaaacagagtaaacgaatgagagtatccctttaaattttagaaatttattttactgttaattgtgggtgtttcattgttttctaattctcggcaagccaccctagctttgaaccgctaaaagtaaaagtataaaagtcttattttaaaattaaattacttttagttgttttgtttatttttcttggctcgtagctaagccatagctttattggatcactgtccactatatttattccatatcgaaaaactattttaaaagattttagtagtggtgtccgttctaatattctaccactaccacacatgattcgttcgatcgtgtaccaacgttgagatggagacttagcactgtcatggtcgtgtcacccaaatttatattgtttaagggttggagtgagccaatctgcgaagcttcaaaggatgaatgtgtacaatataactatttataactgtcataggattacttatagtcactttgctagctattgaaaaaaagctaaagaagaattcctatgtcctttgtttagtaagggaaaattggaaccaagacattataattttgtaaaatttgagatatgccatcctgaccaacatgtcattgactcatgtaggtcctacatgtcattgatatatcgatggcatattttaaactttgcaaaattataatggcatggttccaaatcttgtttttttagtctgccgtaacttctgtacctaacacactgtctccagagaatggtgttgatattcacgtggagtttttgagccatcaacatggcgcctatcatatgcagaagtccttgcctctttccaaaataaaatgcataagtactccataaaccaaccagcgtgtgcggaccatttgttctttgctctgaagctttctgtaaatctgtaatatattggcagcacaaaatgaaataacgtgtttattttgaacgcgagacaataaatttgcacttgagccgctgtctcgctgagaccatgcacgattataacatgttagacttaatatactccactaatcaatcaaccaacaatgcacaaagtgtttctgagatattttagaatgcttggtggtatcaaccaataccatattgtagcacgttaaccacacctttggagattcttcagacaaatatcatctattacacctttagcttcatgaccagcaaggcagcaagtgacctcgattagaaatggaagaggtcgcggtctcgatgtgatcgtttggattctccattaccgaaagccgacgagacttttgagtaggtatcttgaatattctctggtttattccgtaagaactgaccgagtgacagtgtgacacctaaacattactcccttcgtcccataatattttaacctaggatcggacaaaacatttcataggacaaatttgtccagatttattgtcctataaaatgtctcgtacggtcctagattgctatattatgggacgaagggagtaccttgcatttctatccgaaaggtacatcacctgtgaactactgtttgaagttgtggtggaaacgagcaaatgatggaaatttgaagcaagttggaacagacgtcctaacacaattcgtgcatgagaatactcccaagcactaaaaagtttgcagctttgatcacaggattgacggagttgatactgctgcagaattgaccaatttatactgagaaattctatgttttacgtactactgacaaatattttgttctacaaaatggcgtcaatgaagacgagtgccattgccatcatttttagtgcccttatggctccttttattttcttcgttctgtcaaaaaatatcgatttgaatgtgatgcccacaggcaaatttcgtctagtaattttactggaatgtgctaatctcgtgcatagaatttggttgtgattaatctttcttatataaaaatatatatactcaatcaaaaaaataaaaaaagaacgctataaatcatcttataattagatttctgacttttaatttaatttggatgtggatgggaataacgccaatttaaagtcatcaaacaaaagcaacctgattatgatatgaggctgtatctatttattgccttaaaaaacaacctggaggggtagagcatgaacatgagtttttggactatttgttcatcagttgcctaaaattttctaatacatcaatcactttttaaaggcatatagtacgccaagatatgtgcacactatataacaaataaccatttccccttctccctcctcctgattcagtccattacctatagcgcttgaactgatggcgagacaagggcctcaccttatttcatattgcgcttgttgcctctatcctactcattggcgacgaggcaatgcctactctgtgcaactcctccctccctctcttcctcctcatcatactctcttgtcttgctaccattacctctctttgtcaagtccagtggaattccctgctccaccactcctcccctgtctctgatggttcgtgccaccaatatctattactgttgccaccgtcgcctaacctcatgacctattctttacccccattgccgtcattcactcatgcgactttggtagcacatcattgcctcgttgtttgctcgtctacggtgcccaccactggtcttctgggtcttccctctaaacccgccctcagtgacccctacccagttcatctcaccaccacccatccctctcatcactattaggcaggtatttcctgtcatcgttacggataagacataccttctatcctacgacttatgaaatatacgcatacgacatactttcgtatgtgtgatagatttctgtatacgataaggaaatcaacaagagattatagaaataatccccacaggcaagtacataacagagttctactcggagaaggttaggatcatactatatcgtgcagggtccgaggtatccgagttctacttggagactaaggggattcactgtataaatacataccccctgaggaatctagggtatcgaatcatagcaccagccaatccgccactacaaaagcaatccgaattacttgaagcctacttgccggtagatctcgtcgagactctctcaacaaggatctcgccggtaacctcggaatcagttgttctctattgtattctgtggatttccatatctcatataaattggattagggctattaccttgcgaggggcctgaaccagtataatccttgccatatctcatataatctggattagggctattaccttgcaaggagcctgaaccagtataatccttgcctctttgtctgcttgatgtcgaatcatgtagatcctcgtaccaacgtattccaatactcatactatccggtagctattaccttgcgaggggcctgaaccagtataatccgtataatccttgcctctttgtatgcttgatgtcgaatcatgtagatcctcgtaccaacgtacttcaatactcatactatccggtagctattaacctattaagttagtaccttgcaaggggcctgaaccagtataatcattacctctttgtctgcttgatgtcgaatcatgtagatcctcgtaccaacgtactttaatactcacactacccggtatacgggtatcccctgtcgatatttcccatcaaggactagtcgatgaggtcaattaaatcgccgcgttggtggggacctgaggagatggggcgcaggtgggatagagagaagaaaatatatgataaaaggttgtgtggtgggattcgaatcctcaacctcctcatttcatacgagcaaccccatcactgagctatgttgggttgtgtgataatagtgcatatctcagaccatatgaattgtgttgagctggcggttcaaccggttgaaccaatcaaaccatgaaccgaggctatgaccagctcaatgttcggtccggtcctaataactatgtcaatgagtctgggttgccatctctccccgactatcatgcttcccggtaggttgaagacactttttaacctattgaatcaaggattgagcggttttaattacccgactcgaattatctgtatcaaagttagtattttatctctctctctctctctccgtgtgttggttgggtgagaggacaaaagttttgcaacttgaacaaattttagttgaatttaaatatttttcatgtatttgcacaatatatttggccgtgtcctatattcctattgggatccaccgatagatccaaaatctcataaatttggttccaagattgtgaaccctgaggcagccaagttgatccaagccaagccaagtcacacaccgcatgcgcgcggtagcaacgtgcgtaagcacgtacacacgactacacaagaggccagccagccaagaaccaaaggggcctaggtggtggagggggatggcgaggcgtttttggccacgcaaacgccaaaacggaaccgtcccggtcgagatccccccctccacgtcggcctccgcgcgcgatacgaccgacggccaggcctccacacacgcatacctatggctgtcccggccacagccccggcgaggaggccccctcctccatgtcttctctctcccgcagtcgccgctataaatattgccccccggccctctcctcctcatctcccctgagcggagcccagcacacacacagacagtgtcgacattagccgttgcagcactcgggcgcgtcctctgaattgcgacgggatcccctcgtaagcgatctccgcacccgctgcatgcatgcaggcgcgtgtggttctctctttccgtttgggttgtgtgtggttttctgattcgatcgtgttcttgggtgtgcatacaatgattcgttggtgccgcagctggaaccggaggagagaaacggattcccgcgataattctggcctcagcgcttggtacgattcggtggatttgttgatggtcatctaacaggaggagagatcgtttcgccgggaggaggacgaaatcagggaatcaccgaagaacgcgcggtaagatgagagataactaatattttctaatttctgctatgccgaattgccaaaaatacgatttgcataaggattaggggctcgtttttgcttcaattgcttgtgattgtgataatctatatgccttaggcccgaagttcaatctttgctctcttctttcttaccattttcttgctttctgattggcaatgccaacctaagttgcctttctagccctttcctgtctctccatactggcgatggtgaattaacgggaagaagtgacaaacatgagtcacttgcaatgcgcatcccaataatggtgatatgccatcgtcactgacttcaggtggtgcacctaaaggctaacgctagcatgcagccgtgttctgtttttcttgtctttcttcttgcgaggacatgggagtcatgtcttgagtggttgatgagtatacttacattgggtatttacaaaagaaacactcgctcgtgatttgatcaatagacctacttcagaatttcagctgatggttcactctccgagcgtaatggctagtttactactttatccttttcataatgtaagtctttctagcattactcatatttttatatatgtctagattcgttaacatttatataaatatgagcaataatagaaagtcttacattatgaaacggagggagtactccctccgtcccatttaaacgcaaccataagtttttatatctaattttaatcattcgtcttatttattttttttatgattagtacttttattgttattagatgataaaatatgaataatactttatgataaaatatgaataatactttatgcgtgacttatgttttttattttttttaaaaaaaaataaataagacggacgataaaagttggatacggaaactcacgactgcacttaaaataaaacggagggagtagtatcttcagagtccaaaacaataggaggaaaagcatgcacctttagtttcctagtactgtcgagaagggctaattggattcgtgccattaaaatggtttcctagtactgtcttctttcaaaaaaagtttcaaagtacagtgctagctgcagcctgcagctgcacttgagtatttctttgctagggaagcgtgggaacaagggacgtaacaaaccatagtgtcgaaagatgcttacttggctcttggaacaccattgagccatctaatctatgttgttctgcatcctggagttgggcatcgctaaaaggaggccagagatttatctgaaagtgtgactagatgattctgtgtcaccttgctaagtgtcctgtcgttctggatctgtcgcgaatattttaagcttttgcagacatgttaacattatctttgtggttcttgtgttaaagttctgtccttttccatgtactctctgtcactgacatgttggaccatgagattttatgcctttattcatgttgaggcttgatctgtactttggcactaaccatatgtatagtacattaagcttctaggtcatttgctgaaagatttagatcatcactatgtcgctttcttcatgttttgcttcaacagaaaagttgtatttcctgaactctgaacaaacagtactggttgtcgttctgaattgaactgtaaatgctataccactagacttgatcgattcgtttctagcggcatgctaattgttccattgcagtttcaggttccctcagtaaaacgccaagatggttaatttcgggaagagactgatggcggaccaattggaggagtggaaagagtatgttgattttgaactctgaaagttccttaacattttgccatgtggatgcactgatctgaatagggtataagtgggtcgacccgcgaacccacttatttggcctataagtgggcttgcgggttggcccacttacaccgattgatatgcataaattagatgtatatgtctttttgaaagaaaaaaaagagcataatgtggatgttgcttgattgcccaccctttccttttccttgaagttatgaatgaaatttgtgaattgtaatatacggaaacaggtagtgaaaggagactgaatcctgtacagaagccatacttctgatcttctaaatattgttactaattatttatttttgctattgtaggtactacatcaattacaaaatgatgaagaaaaaggtaaaacagtatgttcagcagacgcagaatggtggaagaaatcgtgaacaggttcttaaagagttctcaaggatgcttgatgatcaggtaaaacagactgaatttccttcaaaatatgaaagaaagaaaagacctgagttgttgataaaaaatgtcgttcttgttttaccacttaacatcaagtttcttttgtgtagattgagaagattgtgctctttcttctgcaacaacaaggccatcttgctagcagaatcgagaaattgggagaagagcgtgcattgctcatggaacaagcagatgcatcccaaatttctgagctacgagaggcatatagggaggttggaattgatcttatgaagctccttagatttgttgatatgaatgctaccggcatccgaaaaatactcaagaaattcgataagcgttttggctacaaattcacggactattacgtctccactcgtgcaaaccatccctgttcccagcttcagcagatcttcaagcaagtggtaaattctctttcttgcatcttcgaaaacataatttgcgctgtgaggttatattgttccttataactttgcacttgacacctcatgtacttatgatgcagtttatgggtgcagggtattgtggctgtagttggtgctttgtcgcgcaaccttgcatttctccaagatcatcaaggaaactttccatccatctatgatcatccatcaattaccttaaaggtactccatttcttgttaaatgttcacatgacaagatcagacatttatgctgtaaaatggagtgaactaactttccttctgatgcctcaggaccctatcatagaacaaataaatcattcggtgcagaaactcacacacgcaacaaacttactgcaattcatagggcaacatgcacttatcattccagaagatatgcatagtggctcagaagatcttgtcgatgaccagagctaccatttcatgtcgctgcttctgaacctagctaacacatttctttacatggtgaacacatacatcatcgtgccgactgcagatgactactcagtcagcctcggagcagcagctaccgtttgcggcgtgatcatcggatcgatggctgttgctcaagtgttctcttcagtttacttcagtgcctggtcaaataagtcatatttcaggcccctcgtgttcagcagcattatgctgtttttgggtaacctgctgtatgctttggcatatgatgtgaattccttaactgttcttatagttggccggctgctctgcgggtatggaatgtcttgttctttttgatctagtacttatgctttttttttgttagcttcctgaaactttgtaatgtttgttgtgctcgtttaatcattgcaatataaagctgttctagtgatcacactgatatatgttgtgtaggttgggttctgccagagcagtgaaccgcaggtacatcagcgactgtgtgcctctcaaaaccaggctgcaggcatctgcaggatttgttagtgctagtgctcttggaatggcctgtggtcctgctcttgccggtttgctgcagacaaattttaagatctacggttttacatttgatcagaacacgttgcccgggtggatcatgtgcttggcttggattacgtacttattttggttgtggatttcatttaaagagccagaccacattgttagagagaattcagtcaacacaccgtcatctgattcaggtaaaatttctccgttgcatagtttaaaacatagtttgagaagttatgccaaggacatgatggtaaatgctctgaaaatagtaattaagtaatttgctttgcatagcaggccatcgaagaaatagtaatttggaagatggtctagcacagccttttctcatagatgcaaaggagagtctggatgaaaatggagaggataatgacgaaaatgaagaagaccctgaagactcacataaaccagcaacatcacttgctgcagcatacagattgctgacaccatctgtgaaagttcagctattgatctactttatgctcaagtttgcaatggaaattctactgtccgagtcgagcgtggtcactacgttctacttcaactggtctacaagcaccgtggccatgtttctagcagttcttgggttgacagttcttcctgtaaatgtcatcgttgggagctatgtcaccaacttgttccaagacaggtaagcatacatactagcactagcacattaagttttgtttccttttccactataatcctcagtgtttaatttccactcgtttctcttttgttttctttaggcaaattttagtggcatcggaaatcatggtcctgatcggcatagccatgagcttccgtttcacctctcactactccgtcccgcaatacgtctcctcggctctcatcacgttcgtcttcgctgaggtgctcgaaggtaagtgacagtaaacaagagactgaaacagaagtgaggcgtgtctgaattttctgaaaccaccatttcacttctgaccctgtgaacaaaacgatgcaggagtgaacctgtccctcctttcccgggtgatgtcgtcgaggctctcgcgcggaacctacaacggcgggctcctctcgacggaagccggcactttggctcgcgtcgcggcggacatgacgatcacggcggcgggttaccttggccagaacagcctcctgaatgtaaccctgcttccgtccttcgtgatctgcgtagcttccatcgtcgcgacattttgcacctataactccctgtactgagaatctgttctctccgtctgtatgtacaagaagcagttgacacagttcctggccacttgggtggcctgtaaaatgttaggccgatgcagctaatgctggtctctaattgtcatctgtggaagattaggttatgtttgtagtagcagttactaagttaacagatgatgtaagagcatgttcaataaactctactgatcaaatgctccaaaagcctcttggacaatcctgcttgcaccggaccagcgagttccagggcaacggcaagagcataaaaaaaatgtaggctcagcggccaagcaaaggttaattggtgcggatcagagtgaagtgaggtgatcaccggtggtttttgccgttttggtttcttaattctgagtcctttctttcgtcacactcatggcatgctcaacataggacgactcagtcaagtgtgcatagactatagtagagaaatacttctgcggagcgaattattagagcatgcatctggtgctgaaaattgtctacatggtcgccagtgatcagaattcagacattatactgttctatgataatactccaacaaacacctgtgttcatatatatctgactaaaacggtatatgttgcacgtagtgtgcgcttgtggtttgtggtgtatgtgtgtgtaatcgagaaagaacagtttttaatctgacatgtgcctgtagtttgttgttttatgatgctacgacatatcatcttcagaaatgcattctgacaacagatacgctctggataattacgccataaaccgaggatggcgtatttcaatcttacgtttcccacatctcctctcattcgcctacaaaataagcagacaagcacggagcagaggtgattaacatatccgaatctgtcgaacacttgagctgacacaaaggctgcggagcatgaaggccggaggccggttccacttgcaccaaaccgtaccaaaccagactaacggcccatgcaacaacggtttctttagcaaaccattcatctctcgccagtatataagcacacctgatcctgtacgccaaacacatcaaacacgacgcacattcctgatctcgtcagcacagacgcagacgatggcattcctcgttgccacgaccctgtttctgtttgggcagctactgctgtgcttctctcaacaaggtgatcagtcttgttttttgatttcttggtccgtctgatttttactgattcttgtaatcatggtgtgtgtgtgtgtgacagtgcgaggtgtgaactacacgttcatgagggaggcggtggaggcgccggtgatggcgtactacgactacatcatcataggcgggggcacggcggggtgcccgctggcggcgacgctgtcggagcggtaccgcgtgctcctgctcgagcgcgggggctcgccgtacgacgacgcgcgcgtcctcaacatggcgcacttcgcggacgtgctcgcggacacgtccggggcgtccccgtcgcagcggttcgtgtcggaggacggcgtgatcaacgcgcggccgcgggtgctgggcggcggcagctgcatcaacgccggcttcttcacgcgcgcggggcccggctacgtgagggccctcgggtgggaccccaaggaggtggtgagcgcgtaccagtgggtggaggacgtggtggcgttccagccggagctgggcccgtggcaggcggcgctgcggagggggttgctcgagatcggcgtcgtgccggacaacggcttcacgtacgaccacatcctcggtaccaaggtcggtggctccatctttgacgcgcagggacggcggcacacggcggcggacttgctgcgttactcgcgccccgacggcatcgacgtgtttctccgtgctagagtggccaggatcgtgttctctcgcaaaggtgaggccatgtcacgcataatttagaaaaaccacatttttcttgttcaaaagctcgtgttaccaacataccggtaagtttgttaattatcgacggcaagttaattgttgtggcactggcacgcacttggtgccgctgcgctgtactgccatagtagttcgcgcgcactgaaaacgcgcgagatttgcagggaccaagcccgtggcgcgtggcgtgctgtaccacgacgcgcggggtggatcgcacatggcgtacctcaaccatggcgctagaaacgagatcatcctgtcagcgggggcgctgggcagcccgcagctgctgatgctcagcggcgtcggccccgccgaccacctcgaggagtttggcatcagcctcgtcctcgaccacccaggcgtcgggcagggcatgtccgacaaccccatgaacgccatctacgtgccgtcgccgtcgccggtggagctgtcgctcatccaggtggtcggcatcaccaggttcggcagctacatcgagggcgcaagcgggtccgactggaacagccgcacctcgggcgccgccgccgcgcaggtgcggagcttcggcatgttctcgccgcagacgggccagctcgcgacggtgccaccgaagcagcgcacgcccgaggccatcgcgcgcgccgtggaggccatgagccaggtccccgacgcggcgctccgcggcggcttcatcctggagaaggtgctcggcccgcagtccaccggccgcctcgcgctccgcaacctggaccccgacgacaaccccaccgtcagcttcaactacttcagccaccccgacgacctccgccgctgcgccgcgggcatcgcgaccatcgagcgggtcatccggtccagggccttctcgcggttcgcgtacccgaacttcgccttcccggcgacgatcaacgtcacggccgagttcccggcgaacctgatgcgcatgcgcggcggcagcgaccccagggcgctggagcagttctgccgggacaccgtcatgaccatctggcactaccacggcggctgccaggtcggcagggtcgtcgaccgcgactaccgtgtgctcggcatcgaggcgctgcgcgtcatcgatggttccacgttcaacgcctcgccggggactaacccgcaggccaccgtcatgatgcttggcaggtatactcctatctctctgtgttcaactgttcattggttgatttcgtgccaggaatgttctttgcatagttcagtggtcaacctgatgtatccttcgtgtctgcaaaaatctgacaggtacatgggagtcaagatccaaaaggagaggatgatagctgaaggatcaggaatagaaccatagtctgcttctctgcatgatacacgagcgcgctgcatttgctaatttctctctggattatctttagtgatcatcctatagatcggaaatgctaattgtaatcgttgaaattacattattaactaatttgcacgattgtgaatgctatgctacctataaagaatgatgtggtgtttgtcactaaatttactgacgccagaaacttttttgttctagaattatgatatgccgtgatactttcatggttccatgtcctggagtaacgagtgcattccaaaccttaattataacctagtttgccattatgcataaactgagtgcttgatatgccacactaagcgagtacttatctgcaaaattaacggtcactggacactggcgatcagggtgattggggtcgatcttaaacggtcaaacaacgaaccgtcagtttgtactgacgtgtgagaaccttgatttgaactgacaattttcactcaaactatttgatacttcccttcttttttttttattgtaacgggttcaatcaagccaacgccgatgtactgtacaagcaagtattctgtattcatgtgctgtactcgttacgtattttgtgtggtaatggtagcgtcataatgtctgaacatgctctacatattgtcagattgaagcctccaatcactctgaaatcagttactctttgcatgtaaggtttgtttttaagcctttataagatgtgtaggtagtctgtcatctttgtacacggtttcgctgtctttattaatgccggtgcaggtaccgtcttgcttttctttctttttggttttaattttgagttgatcttcagggaccttcagggttctctttccagcagagctctggctgaatacctttctctttgggatgaacttcaatcagtggctgtccaggagggtgtgagagattcggtggtttggaggtttgctgctaatggagttttctctgtgtcctcagcctatgatctcttctttcttacctcaactaagtgcccttttggggaagcaatttggaagaccaaagcgccggcgagagtcagattttttctttggttggcagcaaagggcagatgtttgactgcggataatttgagcaaaagggggtggccgcataatcctgactgtcttctttgcttgtcggcacctgaagattgcaaacaccttttcaccagctgcacctacaccaacagggtttggtcacttttgagaacttggctgggtattggctttgatctgcctggccaaagtggagaagaactggcggtttggtggcagcgtgcgcgcagctgttgtcagcccagctacagagatgcttttgactccttcttcatgttggtttgctagcggatttggaaagaacagaatgctcgagccttcgatcaaaaggagaaagctgtggagtcgctcgttgcagacattaaagaagatgtgatggtctggagagctgccggtatttttcagtttagtgaggagtagacctttgagttgctgcttctgtaaatagttctccccttttctttttctcactttgtttcaaggcttttgccttgactcgacaatttaatgtcgggatacatgtattttactcccaatcttaatgaaatttggtcggcattctttcgccgacccggcaaaaattttgagttgatctttttatctgcttgcttcctattatcatcggatccccgaagtgcaacttccagtacttcaaacagacgaacagagcattggattggctaggaaaagttaacgagtcccaagttattcggaggactaggttttcgagatattagatgttttaatcaagccctacttacttagcagacatggagattgatcgatactccagaaaacttgtgtgctcgggtactgaaggagaaatattatccaaatggatcattaactgatacaacttacggtacttactcttctgatgcatcgccaacctgaaaaggtattgaatatgggctagaattgctgaacaagggtttgatatggagagtaggagatgggcgccaaaccaaaatctggaggagccaatggattgcacatggggaaaaaccaaagatcttgcagaagaagacctggaatcgtcttatatatgtacacaagctcatgaatcctgacaccaaaacatggaatgaaccttgaattagacatgtagtcaaggaaaatgatgcatctgaaatcctaaaagatcaaaatacccgaaagggagatgcctgatttcccagcatggcaccttgagaagataggaatattcactgtcaggagtgcttacaagttagcgtagaatctagccggaaagatatgcattgaatattcatctagctcggcaacagatggagagacgaagatctagaagaatatatgacaaacaaatgtccaacgaaaagtgtgaattttcgcctggaagctagcccaagacagactgctcacttggggaaacaagagaaaacaaaagatataacagagtggcatttgcccgatctatggtctgacagaagcaaatggtgtccatgctacggtggagtgtactgtggctagaggtttacaggagacaatgagagcacactgggtattgccggaagaaaggagtttcaaatggacagggcctgattggttgctagtgatgctggatagtttgaacagattggtgaaggcacatgttctgtatttactttgaagagcctagcacctgcgaaatgttgtgatccatggtaaaggaaatgcatcaatagttgactcggttagcttcctagtaagctatgaagtcaactattgccaatctgacaaagggaagatgaccacaaagggaagggccctttgtgtatagaaccaaaccagaaattctctctacaagtattgacagacaggtagagaaatggtgtgctccaccagaatgaaaactgaatgttgatgctggctatagggaaagaaactggggatgcaagtgtcgggtttatcttcaaggactggaggggcttggtgctacttgccgaccacaaagccttgcatcactatggctctgctgcccaggctgaatgacttcgagcgacggttgaactgatccacattccaattgtgatggagatggataatgtagaaatagccaaagacttaaaacagcaggttccttgaaatcggcttggcgatgacgattgaagagattaaaggaataatgcagtgttttcaacaagtgcaagtgcataagataaagagagaagcaaatatggtagcacatgttttagcccaaatggtaatgatcttgtgcatgcggagtgaaggctgtgtactcccacaagaatcctagacttaatgaaccaagaatgtaatcccttattcacacattaataaagttctctctttaccttaaaaagaaaagacgaacagagcatcggttattcagtttcgttttttggttgtgtacattgtgtagagaccggattcttaatccattattaaaaaagaaatcacctccattagcaaaatcctaaagctaataccagcaagttgctgagaaagatagcagtagcgagtgaccgtgatattcaaagaacaatgaagtggccacgaaattacacaaggtggtcattatctaaaaaaagaattacacaaggtggtcgttatctaaaaaaaaattacacaaggtggtacgaaaagtaagaatttacaagggttcgttttccttgagaaccaaagggaagagatcggatagatcaggagaccgcgatgcaacttattacttgtcgcggactcgcggtatgtgtggtgggatcggtggatctaccgcgcccggttgtcgctagcgcgctagcagcagcgcgtgcgcgtcgccagaggcgtggaggcctcgtctcaacgctcctccccaaccaccaaatcacatggcccctgctgcatgctcgcttcccccgatcatcccgccggctaccacccctcgcaaattccgccctctaaaataaaaacgcaccgttcacgactccacgctgtgggagccagacttttctatactggtacagacgtgcagtctagtagctcgcgcgcacagtatgtcagtacgtagtggtatgtcttgcgcttgcgcctgtcggtggatggcatttctctcgcaaaatcgcgacgcggatgcacagacgaatcggcgatggatcatggtggatcacgccaggtgctgcagggccgcaccacaccgctgcagcgtcaccgtcggtgcagcacacgccgccccgccacccgcgcgcacatcggtgacagcatcagctcacctcggtagctattaaaatccatcccccttctccacctcacctctcctccctcccagacaggctccattttccactctcccctcctggcctcccacctcccatccggatctcgccgcgccgcgccgcgccacccttttccgcgccgcgtcgtcgggcatgggcgtcgccaccaacggctcctcctcctccacctcggagtcggcggagaccgcgcagtcgcaggcgtacaagttcctcatctacggccggaccgggtggatcgggggcctgctcggccagctctgcgccgcgcggggcatccccttcgcctacggcgccgggcgcctcgagaaccgcgcccagctcgagaccgacatcgacgaggtcgcgcccacccacgtgttcaatgccgcgggggtcaccggccgccccaacgtcgactggtgcgagacccaccgcaccgagaccatccgcgccaacgtctgcggcacgcttacgctcgccgacgtctgccgcgcccgcggcctcgtgctcatcaactacgccacgggctgcatcttcgagtacgacgccggccaccagctcggcacagggatcgggttcaaggaggaggacacgcccaacttcgtcggatcattctactccaaaaccaaggccatggtatgacacctatcttttctttcttttttttaagagaagggtttcttttacctggccactacatccaaccggatatatacggccatatattttcttatccacaatgaatggactatgtgcacatctgagcaagctaaccggccggctccattttgcttagtttacgatgacgatgtgtaattgcacgttggaaagttggaactatggttttgtgtgatcatggagtgaaaggtgacactttggttgaggccttgagggacgtatgattagttagtttcatgccagtactagtattgattagttctcgtttgattagatctggcgtggtctgtacaggaagcggatcccctgactgtgattagcaaagtcacaggcgtgcagttctgctcaatccaccatccattctcatcagacggtgcacaccacttgttttctcaattcctttcttctgctcaatccaccatccattctcaccccttcagagtctgcaccttcaaggccggtcgccatgtccgtcactcctaaccagatcgcaatttcagctgctggaaagctgtaggctattttagtcagattgtcgttgtaacaattaaaatggtgataggtggttgctagatccggtaaaagcttctccctttgcatgacctctacccaaagcactgaatgtgaacatcaccttctgcaatacgagcattttcttccaactaatggactctcactggtactcaaccataatcaaatgttccggccatctcttcgtcgagatgaatcatctctgtgcacacggctgcacctctggattcggatgccaagaaggtagataccgggatgaggtgcgaggccggaagatttgccaacggttagtccatttctgtgttttgtatcgccgattacaagatggaaggagtttttgagccgatgatggcagccgcggcgggccaagaaactaccgagtgaagcgagcaaggagaagaaaggaattggggcaacgagtgtgcaccgtcagatgagaacggatagtggataggatggaactgcatgcccatgactttgcatggcggtctgtacaatatccccaatatcttggtcagcgtgctgatgcagatccttatggttgacaatgttgacagcttgggttgacttactcctagttgtaatgatggcagactattgagtaaagcttgcaggaacatgtttccttctgccttctggaatcaaaacacagtattcattttggtctgtcgagcattctgatctgttattggtccatgcacatttgcacactagttctaagttttaaacttttcatagtatcatgctttgattttgtgtaacattctccatgatcttggccaattttaataaataaagggtagcaagtttccttgaatcaaatagctaagattgacactagaaatcctgtcaacatcttgaagttctgggagtgttaactttatgctagctataggcttagcctttactttgacagaaagttgtgctatttgaatctggagtttctataggtttagctaattaacgacttaaaatgtgctaccatatactttactagaattgtatatgttttacccttcatgtatgtgattgctgccaaggttacagaggcatttcatcttgttttaggattgtttccttgctggcattatcagatcattgtttcttggagtgcatgcattagttttaaagaaataaactcctgacatgcattgtaagtatagtgtgaccaaaactattgtgttctgacacttggtaggttttctgctggatgttctgggtagaaaaaaaataaatcattaacttctgtaggttgaaaacataccgatatgaaatgaatatgctgaatatgtagcgcaattggatgaaattttgtaatactagagaaaagaatactttgcgagttccaattaagtgtcaagtttattgttcatagccacattatttgttttccacaatttgtttcgaagtttcaacctataggtggttgagttagatgagaagcaccaaatatgcgtttactttcacaagtatgttttttgagttattttgaatcccctatatgccatgatcttgaatctttgcaaacagttgtttatttatcgaacaaaatggtgtctagtctcacagagagagatcctctcactagcagaatcacttgtctgaatttggttagagtagtttgttgtgttaccatgctatcttgttgtcctgtatgttcatgatagtttctatttttaaatcagattatttttcctgacttgtatttcacagttaatcttagcattgtttttaacaggttgaggaactgctaaaaaactacgagaatgtatgtacacttcgtgtaaggatgcctatttcatccgatctatccaatcctcgcaacttcatcactaaaatcgcccggtatgataaagtggttgatataccaaattcaatgacaatattggatgagcttcttcctatctcaatcgaaatggcaaagagaaacctcactgggatctggaatttcactaatcctggcgtggtgagccacaatgaaatattggaaatgtatagggattacattgatccgaatttttcttggaagaactttaccctggaggagcaagccaaggtcatagttgcaccgagaagcaataatgagcttgattgtaccaagctgaaggcggaatttccagaacttttgtcaatcaaggattctctggtaaggtatgttttcaagccaaatcagaagacgtccaaggcttgacaaatggaacggtctgcacacaatgttgttgttatttattccatataaattgacatttctctccctggtgacaatcaataagcatgcatgatgactctttccctgtgtgtgcattgtttttgaagcagataggtttctcataggaagtcataccccgtcccgtcatattgattacatagaacaaggcaaggtgccatatagttcaacttttgtatgtcttctggatcgtatgaataccgtgggaaatgggtaagggtggagattcctctgtttgtatcttacaattggaatacagtcagttgcactgcgtgttgttcaataggaaatggctttggactttccttcatgtaacatgtaatgtaatacattgaattctcagctaatatattgatatttgatagtatcgacttaggtgatgttattttctcaaagatgaagattaagtttttttacgcaaaacgagctggtattaacatatgattgattgagttttaattactacaaacttgaaaattaaattaatatgatatcttagagcaactttcatatagaaagtttccgtatgaaacgcaccgtttagaagtttgaaaagcgtgtcacaaaaatcttaattttcgtccaactcttgttgaagaaaagagcaggactaagacatctgaatttccaattttgtttttgaaggagggtgaattgtcacaaggtatagcatattagctttgatttcttaatttctttccatcgttagattttgtgccggggaccgggagagggaaaaccatcatgaatagcataaatcaagccaataattcatcagagaagaaaatgtatacctcatcaactactccgtggaaatacatactccatctatttctaaatatttgacgcagttgactttttaaaatatgtaaccgtttgtcttattcaaaaaatttaagtaattattaattattttcctatcatttgattcatcgttaaatatacttctatatatacatacagttttacatattttaaaaaaatattgaataagacgaacggttaaatatatgctaaaaagtcaacggtgtcaaatatttaaaaatggagggagtatttgtttagaggaatcaaaatgattttgtagatcataccagctcaatgtcggcgactcggttgctgttgctcgctcctggcggaagcagaattttttttatttataattttttttattaaaagttttacaaaaataattttccattttgaaaattgacggaaatagtcgcctaccgccctctgggagggcgatttttaaaaatcgccctcccagagggcggcgaaaatgacgtggcagacggccgttcgctctcgggcgacggccgtcaacgaaatttgcaggcggcccccttgccgccctccgcgagggcgattttgtactgtgcggggggccgcctgcaaatgggcggcgagggggggcatggaaatttgcaggcggcccccttgccgccctccgcgagggcgattttgcactgtgcgggggcccgcctgcaaatgggcggcgagggggcatggaattttgcaggcggcccccttgccgccctgggggagggcgattttgtactgtgctctatattttttttatataaatatcaatagttatcaaatctttttatattgaaaactatagaagattaaaatctccaagattggtaaaatacaattttattattttttagggcatatttggaatgttaccgtacaaatattttgttaatgccaaaatataagcaagttttggcactaccaaatatttggtaaggtaaaattgcatttgatcatatttggtttgctgccaaaatgtaaaattgtagtgaagaatgttgtacataatctcaattctagattacgtattaccaattaataggcttccattttcgtgtgtggtgtggtagtgggaaagaagatatgaagaggttgccttcagattgtcaattatatagcgtcgttttcactgcaatatatgtgaactcaatgagatacattattcattagatgtgacaagacgatcacgcgtgggcgtgattcactttatgtcaacaggcagcgccgaaagttgatagtgataactcgagctgccgcttttcatgtgtgctgttgtggactgtgcgcgctactggatatggcactaccgtgaagcgccgaaagtgtgttgttgtgagcataagttgttcaagcaccatacgaatgaaaagaactacgtagacgagacaaacacaagtagtactgcagtagtaatagcaaaagtagtactgctttacaagtttgtaagccaaaagaaacggtcacataaggactgaagaggtagaacactactgacgaggcctcttacccctgtccctcctaccctgcgccctaatgtgcccctgggagtacgtgagtcggtccgggggtacggcacggccaacccgtcctgcctgtacaggtgtgacctctggctgctcctgagtgtgcgcctctggagctcctccaagctgagaggagcctagtacgtcctggtggtctgcaccgtgcaagtcgtcgtcgtagaactggctagtaggaccagtcctaccggcgtgagacgaagaggccccagtaccgaagatcccggctgcaaatcctgctggacaaggatcatcagtttcgtataggtatttaacagtattaataaaaagtaaagtaccgtgtgggcgagggatcgacgctccgtgagaggaagagctggcgaacgcgcctgaagaggtggcgaacgcccctgcggagctcgcggaagcgccggtcgtgcctgcgaacgcgctcgaaggcatacgaggtcctgcgatgaggaaacgtgcagttaaaacatggtgacacattcgtgcaaaagctgaaacaaaaatgaactaatatctgggctgaactgtaccgtgcgaaaccggtgctgtaggtcgcactgctccgaagctaggggcgctcgaagacaaacgaggtcctgctccgacggtaggaccgcgaggccgtgggtgtaccggaccagctggaggtacgacgtccacggcgctgcgacaggagaagacgcgcatgaccgcacgcatcttctcctgcatccggtcgaaggtcgacctctgctcaacgtcagtcaagtgcaaacctctgttcaacctcacctggactgcggtgatatcggcactgatatcccgtgccgcatcagcctatgcaagatggaaataaaaaattcagtagttgtcctatattatgcaagataaatgacataattgttggaagtaatacaaattggacgtaccgccacgaagtagtctcggtcacggtgcgtgggatacgcgtccgtgacagcggcaacgtgcggctctggggcgtctggagtgaaggtcacacgcgcacgagtgcgaggaaggtaccagcgaaggtagtcacggtagttctcctccgtgtgtgggaagagctcgttgatcacctcctctgtagctaacacccagtcgtcaacgtactgctgtacacgtggagcccaaagtgcgcctgctagctgtccccgtcgagtcaacctgtgaagagaggtaaattgtatggctcgatgatgtaattatcataaaaatttagaaatgaacaatccgaactcacgagtggtcggcaggggggacggtcggctgcacgttgccgggaaacacctgcctaagtccgaactgtctcatcacacgctgcggccagtgaggctcaacgaaaatgtcgaacaccatcggcaggatggtgagccagtaagcctggtcgcgtgtgcacaaggacgaaagtcctagcggtgctctcgcagcgacggcctcttctgtgtacggctcccagatgacgtcgctcggctggagacggtcaaactcgaacacgaagtccgggtaaccacgtctcacctggacgtgagcgtaacgacgctgcaataaacatgatcggaattagacatgttatgtgaaggaaaaaaaaagaagaggactgataaacttataacgcagcgaagttgcactaaccccacatcgacaccagtaagtccccatcgtgggaccgtcctctggccactgcgcgctgcgaccaaccccgtagggtgcgctgtccaccactggtcgccctatggcaaacctctcggctgcccaaagctgaagcaacataggacagccagcgatgatcgctcccgcgtcagtcttcgtgcacgcctcacagagggcacggtacgtggctgctagcacggcagaaccccagctccactgcggcacgtcctgtggctgagcatccgcgatggaccgtgcgtagtggaccagccggaagtccacagcgtgcccgtgggtgctagtgaacatcacccacccgaacaaccacaacaggtacgcctcaagggagcgtcggaccgagtaatcatcagcgtcagggtgcagaaggtccgcctacagttaagaatgaaatgttagtacaaaacactgatccggtcgcaaataagcacgtatgataataacaacttatgtacttacagtgaactggagcaaccaagccttgctaggcccgactgtagagtacggaggaagggtggtggtcggtcctaggtgtggaaggcgcatcacctgctcgaagcgcgcagtgatatcctccttccacccaaaaacaccgtcgacgggaccaactggtgctcccgccagcggtagcccgagcaggtacgacacgtcctgcagtgtcggagccatctccccacagggaaggtggaacgtgtgcgtctcaggtctccagcggtctacaagagcggcaaggagtgaccggtctgcatcccaccgcttcgctgggtcacggtcgtcccccgccgcctcaacaagcctacaaagtggtagaaggcctgccgcacgcaacctgtatagagcaaacttcaaacataagtataaaacaaagaaaagttgagttgaaatgtgaacatacgcgtaccaaggaacgtgacgggggtcgacacgcaaccactcgcgcgacgtgcgtggacggaaggtgccgagctgtgcaccctcgactgctgacaggaacgagcggtggttcctgtcaatcccacggttcaacagcgccggtgtgtcgtacgccatacctgcatcaaataggttgatcagaaacatataaataattagttcaacataagtaataaatgttcataagcgaattactaacacatattaaacaagagtacaaacaaacaaaagtgtttagtccgaacactcatcacgataacattatgatacaacaccgaatagttcgcaatactactagtacaacaatagtcggaggtactcattacaacaagattgaattgaaattacacgatagaagtatttagtccgaacactcattacatcattttatttcctaaatcgaaagcattgttacaccatggaatcgcctgctgcgcgacgacgccttggccttgcgcgcctgcttgttgttccttcaccaggtggtcgcctaccatcacttgcctgtccagatggactagcatctgcgccgcttggaacttctgcattcttcgggcatgtcttgtaagtatggccgcgcagatcacacttgctgcagcgtaaagtcctcccacctgcttctgactcatccatatcatttctgatgcgtctagtttggcgtcgaccctttttcaccctaaacttagatggatctggaatataaaaaacttgggcactcagcgttgtgtaagatcctgagatcccgaacccatatatctcctcactccatgtatgaaagattgcttctttcctgaaataatttgagacgtacacattgggagatatgccacaatcaccggcagcagcaagaacgtgtgagcaaggaaggtgatgaagcttcggcttcatacaactgcaggtacatccaccatccgccttcaagacacattcctgcacggcttgcttgcgatagataccacgcctgctcctatcaacacacattatttcataccgatgcacttgtgtgccttgagcaacaactctatgtctccgtgcctttttgattttatcttccatgtactttgtcactacgttgccaaacactatgttgttatcggccatggacggaccaattttcttgtatcgatccctaaagtaggcttgcgtgccgtgaaggatgaattcaacaatagcaaccaatggaagtacccgaactcctcgcattacccagttgtacacctctgccaaattggttgtcattatgccataccgagatccatcggtgtcgaacaatagagcccacttctccttaggctcattctcaatccactgagagaaatttctgatggccgaccctgacctccttctcattgttggtgggtcatcatgtaatgcaccaagaggtatgggaggctcgtcaccttcaacttgtggtctgcgagattgctcatctgtttgcttcgttgtcaactcatccaacttgtcccacaactcattaaatttcttctcttggttctgtgcacagagcctcttaaagagctccataagatgcttgttcttgaattgcttgtagaaatttgcacccatgtgacgcatgcaccaccgactccgaacatcaggccacttagctggaagtcccttctcatcccaaccgttctgcaagtagtcaatagcccgcaacatacccgcatgacgatcatgtataaggcaaacgttgggcctcatacgcaccactgcaatgtgcactctctctaggaaccagtaccagctttcagtgttctcactctctacaaatgcaaaagccataggtagaacctggttgttcccatcacacccaattgctgtcaatatctgacctcggtatttacctgtcataaaagttccatctatgcatagaacaggtcgacaatgcacaaaagcattgatgcaagcacccaatgagaaaaaggctctttgcagcacactctttgttctatcttcaaccgatgtaaatgtatgtaggtcatagtaagtattattattcctctgggcaatggtggctaacaaacgaggcaaattatcataagaagcttcaaatgtgccatacctcatctcaatgatcttttgtttggctctccaggcctttgcatagcttatggtgtacttgaatttgttctcgatgtgcctaataattgattttggttcaaagccaatgttaccaacaacactgctgtacatctcacttgccacaaaagctgaagtgatgtttcggtgatacttctccaccccttgtaagtagcacttgtgctcggtcacaatgctaactttccaataatcattccatttacccttatatgcatggacacgccacggacaatcttccttcatgcacctcacttcatacacataatttgttgacttgaccaccctaaactctctctgcaatgaaactgcccaatgcttcaccgcctccttcatctcatccttatgagcataccttgcaccctcaattacctcgtactccttatactcccagggtacatgatcaccctatgatataacaagaccagagaagtcctcatttgcccaatcagtggccattacatcaccttcctcatcggatgatgcgtcgtcctccgcttgctcattatccgaatcttccctctccatttcatcaacaattataccgactctctccccctcatccgccatgcccatggcctgctcctcccttggttgattttcctcattttgcatcgatggtccaacaacatcccctgcattgctaggaccctccacatcttcggtttgcattgaaacatttgtatctttctcttgtaccgacacaaatataacgaggggccatgaccgttcaaaagccatttccacataccgtctccaagcagcagtgctgtccatcggcattagttcccaaaaataaccttctattgcacgactcactacaacagatactgacattgtgtagacttcttggtctattctaaatcctctcaacaaccaactataaattgactgaaatgttctctccgcaggcctatcgatgcccttagatgtcattacaaaatctgacagatcaacaccatctggaccaaatctaatatttccttcaccatgaactatctgaaatgtgaccttacttgacattgtgcctgatgaaaacaataactgcgttaacctcgcatttctgtactacgccctaagttacattctctacaatattgttctctaaatttctaaaagtaggttacattctccagatcaaactaaactacatcttacaattaacactactgtctatgtctcaattcatactattatattctatgctctggatctacacatatgtgctgtgtgctacagatctgctaaaatatatggaactaaaactaaaacgcaacatatgtactcaaacgtaatatattagtacaaatgcaaaagatgtatgggagcatacctgtgatgaagtgagcgaaccagcagggcttcgccgctccccttctgctgccctcccctctctctctctttcgttttttttggatttttagtgaatataatgaaatttcataggggaggggctgggctttataggggggaggcaaaaatcgccctcccccagggcggcaagggggccgcctgcaaaattccatgccccctcgccgcccatttgcaggcggccccccgcacagtgcaaaatcgccctcgcggagggcggcaagggggccgcctgcaaatttccatgcccccctcgccgcccatttgcaggcggccccccgcacagtacaaaatcgccctcgcggagggcggcaagggggccgcctgcaaatttcgttgacggccgtcgcccgagagcgaacggccgtctgccacgtcattttcgccgccctctgggagggcgatttttaaaaatcgccctcccagagggcggtaggcgactatttccgtcaattttcaaaatggaaaattatttttgtaaaacttttaataagaaaaattataaataaaaaaaattcgcggaagcattcaatacggatgagcccagaacgcctagcgcaccacggcccaaataaaacctagcaacacttctctgttttatgcggcccatctaattagccctattttacacttacgtccctgtttcagaccgctgccatcgcgagaatccttacaatcagttgaactgaaacattcttttttgcaacaaatcactcacatattttagaaaccctctaataagggaattcgttttattttttgttccactaaaaatgtttcacctagtgtactcataatgtttcactatgtatagatttaatgttacagtgaactgaaacatacagtgaactgaaacattcttttgcaacaaatcacccacatattttggaaaccatctattaagggaattcgtttcattttttttccaccaaaagtgtttcacctagtgtactcgtaatgttccattatgtatagatcaaatgttgcagtgaactgaaacattctttcactatttgctgaaacattgtttttatataaggtgaaacaacgtctgatttaaacaactgaaacattttcgatctacttagtgaaacaattccgatatacttgatggaacattatgcaacatttaaaaataattcaataataagctaaaaaaatttcgttggaatatatccatgtgtggtcttgttttaaagatttaattgcaacgaatgtaatggtgcaatcagatcatgatttggataaataatttaagataaaaataatttatagtggttttgcacgcatgcgtcagtgtccaatttttccactcctccttcggcgcccgatgcctaggctatcctaccattggagcgatcctattttctacaaccagaccctttatttcaaactgttatcaatgcctgatcctattttctgcaaccagaccctttattttgaactgttatcaatgcatttacatccctaactatcctatcaattttctgttaagtccttgttttggatcgtaaacatttgtaatgatccagtgttttcaacaaagtccatgtattttgtcagtctttagttttttaaactctatattttgtgattttgtcagtcaaattagaccgctgtagatcagtagatgggcgggttgttgccttgttggccttctacgcctttggctgccggctgcctctccgcgccgcggatgggcactgcggtgcatggccacgcatcttccaactgctcctgtgcagaagaagctcgtggaacgacggttctcggcttctcgctctctactccctctaccaccgcctaccggcggccaacagagcaaagcgcggcaaacgacaattcgggcggactgacatcttgactgattgagccgccgggctgtaaattgttaatgtactggtctatgtggctgtatgaacggttcgcatgctgcaaagctatcgagatagggtatctgcttcccggtcctctgagtagatgctgttggagtagattgagaggccgccaggctccagcaccaagcatttgccatggacagattatcagactccgatgatcatagctatccccggccggagataggataccttccgacgccacgttctcggtgactcggtccccgtccttcccgaacagcacgcgacgacgtcgacgcctagcggcatgcaggccagctctggcaggtagcgacacgagttggacagctgggccgtggggtaacccctgcagcaacgcaactccaaagacggcgccccccaccgcgatcagcctcgctgtccgtgacaccatgatcgcgagcacggagaatacgtacgcgtagcagcacaatcacgccctgacgtgcgtagacgcggacagaaacggtggacgcggccgcggtcggcgggagcaacggcacgccatgccctcgctccagtatccgtagcacgcgccgatccacgggccccgccccgctctggatcggagatcagcgcgcggcgagcccagcccaaccctgctgctgcaagctgcatgcgcaaccgccagtaggggggacctagtagaaaaaggaaggaagcgaagcagatcgcctccgcttttccgtcgctcgctagctatccccaccgcgaaatccgccgtggccaaaaacgttcacgcaatcacgcaaggccttgcgctgggaaaaaaatttggtggagaccggatgtaaccagcctcctttgcagcccctctctgggttttaccgtacgtcctccccggctcgccgcacgcgcaggttgccacttgcctgtggcggtagtttctcattcttcttcgttctctctgttctgttaacgatcggtgtttacaaatgagtccgtatttgtaatgcgggttagcgtcagtgtgcgtttcttctgttctctctcgaagttcatcacggtatggccgaggcaatagaaaacgcggaacgaaacaaaaggctgacatgttgtcagaagtcagaggaggagtccaatgttcacgtgacaggcgagtagatccaagcgggcttaactcagacctggtttagttacaaactttttctttaaacttttaacttttccatcacattaaaacttttctacacatataaacttccaatttttctgtcacatcattccaatttcaatcaaactttcaattttaacgtgaactaaacaaagcctgaaactactcacacacagcaattgtaaaatagttttctcttcatgtttttggagagaaataactttgtccgtacttagggtgagtttgaggagaagaagatcgagaagattgggaagataaggaaaacgaggtaagtcattagcgcatgattaattaagtattaactattttaacttgcaaaaatggattaatataattttttaaagcaattttcctatagaaaattcttgtaaaaaatcacaccatttagtagtttaggaagcgtgtgcgcggaaaaggaggagctttctcactcaatgtccatggaacgttctcactccatccgacatccatccaaagaaatgctagtactacgggtgtgtttagttcacgttaaaattggaaattttgttgaaattggaacaatgtgatgaaaaagttggaagtttatgtgtgtaggaaagttttgatatgatggaaaagttgaaagtttgaagaaaaagtttggaactaaacaaagcctacgtactagtttcactaacggaatgaaaaaacatagaaatagaaaaaacaaaggcttctgacaggaatgaaagtgcaaaacaaaagattgcaaacacataggatttgaccgtttgattgtatcacaggaaaaacacaagaatcggataagagagatagattcacagaaaatttttcaagaggttaaagctcttactaaatttcctccaaaatctctataggattgtccattccataggaatttcacatgataagataggattcaattctttgtttcaaatgcattcaatggattttttttcctatacgattgaaatcatccaaaattcctatgtttttcctccaaatcaaatgggccctaaaatttctttgaaacataggattgacaaaaatggaatataaaatacattactccattcattccagaatataaacatttttatagttggacacggttattaagaaagttggtagaattaaatggggagttgttgtgattggaggagaagtggaggtaggtggaaaaattgaatggtgaagggttgtgattggtcgaaaagagaattttgggggagaagttgttatattttggggtggagggagtagacttttttttacaacaacataaatataaagtagagaattgtaaaacatgtaaaaatacaaaaattaccatttgataaaaaaaagaagaattttaggaaaggtagatactcaaagaaactctccgtgagattcgatcacatgttaaatttttctaaaacttgtatggattaaggtatttgataggaattttatagaattcagtggtgtccaaaactttatttcaaatgataatataggattatgatcctacaaggagttttccaaaacacccttcatcactataacacaaatctgatgccgacaaagctttgtgttgcttgggagccttcgagccttttttggacaatcctacttgcaagaagctatggtcaccgggaaccctaattgctcgcttggacgagatcgctactacaaatctttagtcatgtgagcaagtcaaggaaagaaaactattcaatatctaaaaacaaatgcatcaagcaaaacgaggcaagcttgtgaaagctgtggaaatagcacctatttctaaattgggaaaaatattgaagatgggttgctatattcatttaagggtacatttcaggggacacgcgcgtatccaaactccaaacatactaggaaaagctaaactaaaaagagatcggaagtctagcctttagtgcacgaggaacgtacggtcccaccaaacacatacatatattaacatgtgcatattttgacatgagtctagacaaattgtagatcaactagcctggtaggcctagaaatcacgagttctttttccttgcatacttgcatacgcatatatattaagggtggccaaatcccattggggtatgtctctgcccctatgaggcttgggacggagtagattttgccccatgggttccacatgcgcgaggaggggggatgttccattgtgcataaccaaggccagggatccattcctaccatgaggcctcgaaaacgataaggccaatagaaacaactcataattcttaagaaaacccatttagtaggctcgaatacaaaccggggttgtctagtgtcatatgaacgtcttgtggaaagaatcactcaaattccaatggttgagatctcaccaagattcatgaaccaaaaccttatcccctctatccgttctaattcctctagctttcactagacatctagatgcgcccgtcatcgccaccatagccttgacgacaccacggttggccacctcctctttactatctagatggactgcatggttgagtagatatcttcttctataactccagtgtcaagcttcctccacgccaccaagcgtccaccatctttggcaacctacgttgccagatccaccaaccccccccccccccccaattcctcttttaaccactcgatttgtgtcaccccgctacctacaccaacccaccgttgacttcttgcttgtgactccagtggcatcaacgtcgcctacggtacaagtcatgagtcgcgatcatgtcctgcgtgaggttcgtgctccaccttccaccgcttgctgctcataaacgagttcacgtctttaccatcgtgtctcgcatgcattggcttctatgcgcccacatccacctctactagcgtggcacctcaccagctctcaccctgctatctccatctcctccaccgttgcatcttaccatttggtgtgtctcagttgcacaccaacgaccgtgcaatggcccgatcaggtatttgggccccatcaagtttctgcctaaagaagctagcacggttggttgtggaagatggaatcaaggattagggcctttggggcagggccattcttgtccaacccactctcgtcatatcccattgccaacctagcacaaaacgacattctatatacactgtttttcttttcgtaagatgggaatattgcagaattagaatcaatggaggtcggcctaccaaaacttatataggtaaatgcatggtgcactttttcccggtatagaattggcgatgagagagcgacaatagtagtaataacacgttggtttatcaaccatagtaacacgtgatccgagcatccgtttttcacaaaaacacgttgctgcgtccatccaacgcgaaaagtagtaaacgagcagaagcgataaaaaggctgtcaagcccgtccgtccaacgcccagaaaatgtcgaaagtattttcattcgtgtcatctcccggcgccaggggccgacgccgcgacacctccgcgcgcgcccaccgcaagcaatgtacagcccacacatcccctcagcttccgttattacctctgcgcacaagttaccgggcgaccagacgacggggagccgtcgcacgcataaatatatgcccactccttcacccttcctctgacaactcactgccccccatcttctttcttcattcctcttcccaccaagaaccccaaaccttacctccattgagttcgaaaccgaggagcgaggagttacaagccgagttgtcagaatggatgaggagaaggaagccgactcgccgcagccaccgtccaagctgcctcgcctctccggcgctgacccgaatgccggtatgtgtttgtgtaagcgtgttctttttttttttttgagcgaacatgtaatcgtgtttgtgtgcaagtcgtgttgataagtctggcgtgtgtgttttcgtaggagtggtgaccatggcagcacccccgccgccggtgggtcttgggctggggcttggactcggcggcgacagccgcggcgagcgtgacgtggaagcgtcggcggcggcggcgcacaaggcgacggcgctgacgttcatgcagcagcaggagctggagcaccaggtgctcatctaccgctacttcgccgcgggcgcgcccgtgccggtgcacctcgtgctccccatctggaagagcgtcgcgtcctcctccttcggcccgcaccgcttcccttcccgtacgtgccaacaagatatttttctttttcttctcattgcgtttggcctgattggtgtcgagctttccgatcattcgataatgtggacgccgtttttgacatttgagtggcagtgatggggttggggaacctgtgcttcgactaccggagcagcatggagccggacccagggcggtgcaggcgcacggacggcaagaagtggcggtgctcgcgcgacgtggtgccggggcacaagtactgcgagcggcacgtccaccgcggacgcggccgttcaagaaagcctgtggaagcctccgcggccgccaccccggcgaacaacggcggcggcggtggcatcgtcttctcccccaccagcgtcctcctcgcccacggcaccgcgcgcgccacctgaccagtgaccagaccggcgcccgtttgtttgtttgtctcggcgcatgggaaaacccaaatccgcagggattatgtcatgtcctgtaactctttttttcctcgcaacttttgaagccaaaacaattctcaccgtgttcgatggcacgcgatgcttgtagttggagtagaggtagagtacttgttgagtttgagcggttgtcgcctgtagacgtgcgtgcgtgcgtgcgtcgcgtgatggccggcgacacacgacgcaggcggcaggtgcggcgataattttctttggttgggttgtggggagcgcgcctgcctcggtggcggtggccgcggtggtggtggcatgggcgacgggggggccccggcgaggggcgtgtcctggggccgcgcggggggagagagaaagagagcgctctgcagcagctgcagcctgcatgcactgaccttgtcagtcagtggctcgggcagagtgaggcattggatgctgctctctgtctgggcgtggtgcagtggcccagcgacaagtcccgactcgcactgcatgactcgctgggtcgcaggcaacgctgctgctgctgctgtgctgctcacttgacgcatggaaacggtgatcgggtgcatcgttgtactccacttcgctgagcatgacgcctatcgcgacaatgccggctttgatttgcaaactgcaatgcaacgctgattgatcaggcgttttctctacattttttttcaccttccaaaccatgtgaacattctactccagagaacggttggcaggcagatcatagggatatcgtgcagttgttttaccccgaactcatcgacccctcctcgacctctctgccgcccgagcataccgccggagttccgcgtgggtgcaaggacggtggcgtggcgggtccctttctcatccatccaaggcttaacacggtgatgacggagctcctgtggatctgatgctcttttcttcggaagtcgcctggatctagcatgttgataggagctcgccggctaggagcatggtggtgtggcattgtgggaatcgacgtctagaagcatagtcgtgtggcatatcgtttgggggtattgttcgctcgctcaatggcacggcagtccggttagggcgactggcacgaccccccaaccccccccccccccccccccacacccgtcgcaccggatttggtgaaggcgatggagaaggcaccccgcggtggcgtgcgtgcggtttctctaatgcagaagagttggctaatgccggcaaatagacacatgaagaggccactaatgaggttgcgagaaagggtgcttagataggtggtagtgatgcctcgcggagaagtatggagaggcagttggaggggaggcacatattcgataggccatgcacaacctgaacatgctaaggacatcacgacgaacatcttggcataggcgaaagatggggcgtgaatggagatagcgggagttataggtgacagcggtacccgagtggccaactatggctcgatggcagtaacctaagacgatggcggtgccagtggcatccaaggtatatgaatctggcctgatggctagatctaaagctctccaattgataaaaggtggctacgctaagaagggaagatagtggttccttatagcaaggctaataatacagccgacctgctggctataaggttctttatagccttctctcagcctatccatataatagttagctcttcataattaatacagggcccacttgtctctctcacagagtttcttggttcttatatccaagccggctgttagtttacagcccgcttctcctctctctcttctcttcttttctccaactcagcatttagctggcttatagcctactattatacttgctcttagcaatgtcgatgataacaaggatggctagatcaggcctaatggacggattcagtatacttctggaatacaaggcggctacaaggagagaaggcatcgacaagatatcgacgagctaattggaaattctggtgaccgagagggtgcgatgctgaatcttgggtctaaagagcaggtacaatagcagactattagccagctataaacataatttaatgagataaaagatgagagagaagagcagcaggctacagatctgtagccagctgcagcacggactccaagacgtaatgtgtgtatgacaggtgggaccatatattaatactccatccgtcccaaaatataacaacttttagcacttaggatttgtctcaaaatataacaacctctcaaccaacattcatttcacaaccaatcacaaccctttaccattcacttttcttacctacctccacttctcaaccaatcacaacccctttctatttaattataggaaaaagtacgaattaccccctcgaactaacgcagtcgtccgaattacccccctgaactacaaaaccggacattcttcacccccaactatgtaaacaggacgaattaccccccctcgacccaatccgtggtggttttggtctacgtggcgtacgcgtggcagtccagtcagcaacttatttattaaaaaataggtgggccccacctgtcagtttttctctctcttctctctcttctatccctcactctctttctctcttctccttcagtgttcaaacggcgacggcggaggcagcggcgaggtgaggcgaggcggcagccgccgggaggctgcgcgccgcggccgcgtcgacctcgggggcctcccggtggatagcggcggcgcgagacgagggagcggcggacgggcggacggcagcgcgcggggccgggcggtgggcaggcggtggcgcgagacgagtgggcgggcgctggacggcggatggctgcatgcagcggcggaggcgtcggtggatggcggcggcacgagacgagggagcggcggacgggcggacggcggcgtgcgaggcaaggcggtgggcagcggtgagagacgaggcggcggcgcgagacgagggggcgggcgctggacggcggacggctacatgcggcgacggcgagtacaaccaccgccgcctcgtccactcccgcggcggcgccgccgccgccatggccagaatcccgaggttcctcttcgccaccatcccggacggcctaccgaagtccgacgccgacgccaccatgactacctgcctcccctacttcaggaagctgctcgccgacctcaacaaccgtgccgccggcgatgacgacgacgacgccgtgccaccggtcacctgtgtcgtggccgaccacctcttgggcttcagcctcgacgccaccgtcgccgtgctcgcctcgcgctgccgcccactgcccacccttgcatgccgccttccaccgccccgcccccgcctcgcctcacgcctccgcccaccacccgcccgccgccgccgctcgcgctaccgcccatgcgcgccgcgtgagagagaggaataggacgacccgaggcccgccaccccggtcctcacctcgccattggaccccagcgagcttgtcccggagaaagcctacctcgcctcgtcccttctccgccgcctcgcctcctccgccgccgcctcgcctcgccgccgccaccacctcacctcgccgtcgccgccgccgcctcgcctcgcctcgccactgcccgcgctcgttgcctccatcgtcgcccctctgccgccaccaccgctggacctggaggaagaaggggaaaggaaggggaggagcggctgcggcgaggggggagcaaaccgcgagccacgggccgccgcctccggcgacgccgcgctcgcctcgcgctgccgcccgcccccgcctcgcagcgcgccgcccaccgccgctcgtgctgccgctcatgcgcaccccgagagagagagaatgagtgaagagagagagaggaagaggggaagggtatgtatgacatatgggtcccacaatttttttaaaaaaaatgctgaccggattgccacgcgtacgccacataggacaaaaccgctctggattgggtcgaggggggtaattcgtccagtattaaaagttcagggtgagcaatgtccggtgtttgggttcaggggggtaattcagacgaccgcgatagttcaggggggtaattcgtactttttccttaattatatctacctttttaatagtcgtgcccaactcgaaaactctctatattctgggacagagggagtagtatagtaagcaactattgtatgaattggctattagaacgactatagatgaattgaagctagtaatgggctatactattaaacttgctctaagggtctctggatctcagttggatcgtgtccgaatatacttgtaccactactagtagtagctgttaagtgttagggcaaccacaatgtatgaaaaaagtgaccttaaggcaatgattacacttgtaaagtgagccatatacattgtgtaaagtagcattagcttagagtgcaccttatatttaaggtctaccacaagcaaaaagaaaatattttctctctcattcacttcatgatcaagagatgaaacaattatttttccattctatgtgggttcatcttgtgactaaattctaaccatagcattgtgggtattggctttaaggacatccacaatgtggtgcaaaagtagtccataagcaatagaatattccattcagccatctattaccattgtgcaactagtccatatagaaaaaataacaaaaggtatccatatgcatatggactacccatatggaataaattatattatctatctctactcctctctcttctcctaatgataccttgtatacatatacattgtggagattgttataggtaaaaactatttacgtgggtcacatctatatggatcactttgcaatatacattggtgataccctaacaatgattcacaattcatagagcccaccttaagattacactacatatggcggttgctgttgcttgcccctaccagatacctagtcctagcatgcagatcttgttatcgcacagtcgcatagtattgaccgctgcaggctacgcgtcaaagctcctttgacctgccaatcgccggggccgctgatggtcggattatgcggcacgttcatgtcagggcaaactgctgactcggtatgttcatgttacggtggacaatcatcaggtaacctaactgatgtccagtatgcctcatagccttcactgttgccacattggagattttggagcattggcgaaaaggcaagtggactaaactgtgggccattttcttcatcacctttgttttggggcaaaatggtgtataacgccgtcgaagtataatgacagggctgaatgtgttcttatgcacgatatgttccttctgttaaatacttcccgtttcatattataagactttctagtattatccatatttatatatatattaatgaatctacacatgtctggattcattaacatctatatgaatgtaggcaatgctaaaaagtcttgtaacctgaaacggatgtagtaacatgtaggagtattttactacttctttgttttcaccaaaactccaaaacgtaccaaaaaaatatcttccaatgtgaaggcaaaacataccctgttgtctgttgacgatgagaacggtttgtccacctttacactgttgaacggtgagcaataacaccaacaggaagttgattttagttcccgtgtcaatgaatgcaatgatgcatccacgacccatgcatcttgcttggttgtacagaactccgctctgcaacatgtaaagttcaacctgcagaccaaccatgttgttcaacagtagccctgtacaagcagtcaaccacaggtagcacgttatgttcaggccttcaggccaattctgcgtgggaaaaaaaagaagcaaaattaaaaatataagggccaccacgcatgacgcatgaatgccatattatcatattatgatactgaaactctcatgcttgaagggaaattgctgattgataagtacattctaagactgcccccaatatttcttaagtcagaaatcaaagagaagcgtggttttcgtaaactacagaatatgagctatctcgcaaactccagaaagaaactaccaagcagaacaactggagcacacaattatattatactccctccgtttcagattgtaaaactttttagcgttactcatattaatttagaagttaatgaatctagacacatatatatgtctagattaattaacatctatatgaatatagacaatgctagaaagtcttacattgtgaaacggaggaattataagcctaactttgacaccaaaatctatgaacgaaaaattaacagcaggtgcactcgttatttccttaatattggcagcacaatgcttcgtgccagcagtgaccagttacccatttgctacccagcaaccaaataacctgcaaaacataagaatgaacatgcagatgtccatggcagcatttgtgttcccatcggccgtttgcaaccaatcacatgtttcttttaatcaaaaccaatgatatgcttaacaaaaaccaacactcagctccttatacaaagaaaaccataccaagaaaagagacgacttcagtacaccacaaaatcacaggaaaaagcagttattgatcacccccccccccccccaacacacacaccaaaaaaaaaaactcagtcattaaaaccaacagtctctactagcaaaaagcaagatacatatgccaatatgcaacctccataatataatgatggacatcttttctttttctttttgctttgtttgaggaattgggtttgccatctataccctattattggaaactaacaactcactagcacatgatttttttaattattttttagacttttatttttaaattttatgaatagaccattccaaaaagtatttccaaatctgaaccttttggccacgccaccatggttggcgtggctaaacaacgcaatatttttggaatggtctattaataaaattaaaaaataaaaaaaatcccaccacattaggctaagatcagcatacctagccagtttgatcatttgcagttgcaaactttgcagattgttggatttcttttatcgtccctctacctgtgcagatgtagagatgctcagatgccctatctgtcttctttagcagcgcatcaacatgatcggctcctgggaatatcaatattgacttggccaaatcaatgactactggagctctgtggccttgcaatactcgcactccaaatacaccgaccttcaggctaatggccaggcatggtgcagtggcggtagattgagattttcttgacactgtggccagtactttcctgatttagcatacttgaggtttcaagcattgaaccttttctcatccgcaggacatcaatgcttctaatgttcaggcattggtgcataagagggcatggcttccaagcattctcatgtgaaattatgcagtaatgtttttaaaaaaagtatgttttatgttttctcctccagggtgaaaacacatcttgcaattgtttgctaatctattgatctcttctatctgaattccagctatagatggccatgtgggccgcccggcacggcacggcccaggcccggccgtgcctgggccgaggcttgtcgggccggcacggcccgaccgacgcaccgggccgtgccgtgccagcccacgtgccgcactcacagcccaggcacggcccaacacgcctcgggccgtgccgggccggcccgaaggcacgatgggccatcgtgcttttcctcagaataagtctaaattttctccctcctattgggctatgacattgtatagctaaaaaaagtctattttacctccctcttctttgtgatgtggtatataaatagctaaaataagtctatttaaggtccctattctttagacattgacatttatatgtctatttttagtccctatactttgtgtatcgggtctggcctgccagcccatcgtgccaggccagcccgaccgtgccgggccagcccagcgtgctggtgaggaggcccaggcacggcccgacggtcgggccgggccggcacgggcccgacccaagtcgggccgtgccgtgcttgggccgggccaaaaaggcgtgccgtgggccgggccttcgggcctcgggccttatggccaactataattccagcagatgctgcaagaataccatcaaagaaagttgacaacaaatgatcagaacctgacagtggcagttctttttagataacaagtttgcatctcaaaaacatgcttgaaggtccttaccagtcaccataaatcatttggtacacagctttggaacctatcattccaaactgcaattgcactagtagagataaagaaaaaatctctgtaggagcccgctcaaagactgaaacaaaagataaaaccaagaacactaactgttatactcaaacaattgagtgaatttcatgttcagactcagaatacataccaataatcaagtgatatttgcagttggactcatcataggaccacctatgagtacttttaaaactgatatggtgctctgaaggcaagaattcacttctgtaactaagcctcaggatgaacataatctcaaatgtttcgagaacatcaaatgtcaattacagtcttatttctcgttgcaaacgtctatatttctcttgcattctcaagagtttccgtgaaagctcctgattccctgtcagcatcaacccgttcaacacacggttgaacatgaaccttctaggcagataacctctatccaccatttcttccaccatccttgcagccagtaccatgtcctcagccctcttgcgcataaacatagcacttattatgatgttgtatgtgtcttggttgggcaggcactcctctcctttactcatcttctcaaacaaatccaaacccttttccatctccccttcctcaaataaataccttataagaacattgtatgtctgaacgatgggttcgcagcctccattcttcatcctctccaacagcttcaaacctcggtcaatcttcccagcatggcagaggcctcggatcaacacagtgtatgtaaccacgttagggacatagcccttaacacgcataccatcaaacaccgttactgcatcctccacattacccttcttgcagatcacctgaataagcgcattgtaggtagcaaccgatggagcacacccttctttagccatttcatcaaacaccttgcgagctttctccagctgcccggcaacacccagcccatgaaccatggtagtgtacgagacgacgtcgggcttacagctctcgtctttactccccctcttcttcatctggaggaagaagtcccatgcgtgccgtagctgtccagcacggaagaagcctttaaggatgatgttataggtggtcttcgtgggggcaataccggactcgaccatcagccgcagcacgtcgagcgcgcgggaggtgtccttgacgcggcaccatccgtcggcgagcgtgttgtacgtcaccacgtcgggggtgaagcgctgctcaagagcgcggacgagggaggcggccttgccggcgtggcgcgacttggacagagcgtcgaggagggagttgaacagggggaggtcctgcgcgacgcggtgggagcggtggagcgagaggaagaggcggacggcgaggtcggggcggcgctgcgacacggcgaggcgctcgaagaggatggggaaggtgcgcggggtgaaggcgaggcggtggcgcgggaagaggccgaggatggagttggtgagctggcgcgggcggcggaggcgcgcggagaggtcgagcgcgaggtcgagcgtggagggacccacggcgtgcgcgcgcggcgggaggtggaggagcgagtggaagaagaggagcgcgcgcggcgcgtggtgccagaggagcttgaggacggagtcggccacgggggtcgggagcgacggcgcgacggcgaggagggacgccgagagggagcgcgtcgaggccggcgtgagggcggacgaagggtggttcagcacgacggcggcgatctggcgagggcacggagctggtgcggccgaggtcggtgtcggcggtgggcggggcagcggcggcattggagagcttcgtgccgttcggcggcgttgcgacttgccaggaagaggggatcggttcgtggaaggaacaaacgtgcagtgtgcattgccgtatcgcatggtatgggccgaataattcacagcccggagatgctacggcctatcgggtatcggcctatgaggcccagaggcccatctccaaacgagatgaacccgccatggcaaaacgtggccttcttgtcatatggatccttgcgagctgtcaagtgaactgggaaaaagtacacccaaggtccctcaacttgtcatcgagatacaaaatcgtcccccaatcgcaaaaccagataccggcatccctcaactaacaaaaccgttccctcggtggttttgacaccggttttgtccgacgtggcagctgagtcagcgtgggaaccacgtgggccccacatgtcagacaatccacatcagcctctctctttccctattctctccctcctctctctctcactcttctcttctcttctcttctcttctggggcggcggctggggcgacgaggcggcaagccggccggcggctgaggcagacgatgccggggagaggcgagagagtaggcggcgggcgacaaggcggcggcggcggctgcgacgcgggagaaagcgagggcggcggccggtcgcgaatggcgtcaatgaagctgcgtcgccgccggcggcgaagcggccccgcgcgggcgggcgccgcggcgtcgggcaccgccgcggcgcgggcgcggaagcgactcgttgtccacctcccacttagggagatccaggcgaggctcccggcgaaggaggcggcggtgcgcccgatccgcgccccgcgggacgcgctcgagggcgtcggggagtacgtcgaccgcgccgtgaggccggccgccgccgtgcacagcctcgagccgccgctcctcgcggcgggctgtgccgccgctcctcgcggcctccgccgtcgccgacgacctccccggatacctcgccgtgatgtcccgcttcaaggaggcgctccacttcctctccgacaactgcggcatcgcctcccagtggctcgctgacatcgtcaagtacctcgaggaccgtagcctcgccgccgccctcgccttctcccgcctcgcagccgccgccgccgcctcgtcgcctgccgcctcctcctctcccgcctcgccccggcagcctcgtggaaggagcagccatcggcgcggggccagtcggcgtcctcggcgaggtggcgccgcagctcctccttcctctcccgacgcttttccccggcggcagcaaccggagagtaggtcccagcggtggtggtggcggcggcgagcgcggccgcgtcggccttccttcgcggagccactttcagtggagcgatttggggaagggttggagacatgagtggctaggagtagccggcaagcaccaccactccgtgccggccctactcccccgtcggcatcgccgtgatgctcagcagcggcgtcgccctcgatgcggccgtcacctgccacgaaaagtacgggcacgtctgggaggtgagcgcggccatggcgggcgggcccgtacgtcgtcgtcgcgcatcacggcggcgtcggcgggacgggagaaagaagaggcggcgacgacacgatgacggtgaggcggcagcgcgggcaggtggagtgggaaccgagccacatgtcgacgcactcggcgtggaagccgtggccgcaccgggggaggaacctggcctcgtcgccctcctcgagctccgcgaggcacaccgcgcactcgatgctgtcgtcctcctccttcaccgccgccgccgccgccgccatgctgtggctgtacaccgtgaccagcagcgaccgcagcacctccgggtcgacccctcctccccttccaccttccccgctgctcccagagcgtcgccgctgcggccgcccccgccgcccatgcccgctggagaaaagtgaagagagagaaagaggagaaagggagaggaagggaaagagagagagggagtgacgacgtggcatgctgacaggtgagtccatggtgactcagctgccacatagaccaaaaccagagttaaaaccaccgaaggatctcgggtgatcggttttctatagttgagggacctcatgtatctggttttgcggtttgaggacgttttcggatctcggtgacaagttcagggacctccggtgcactttttccagtgaactgcgaatctgtgatgactgacgagcgatgctggatgattatggtccattgcatccatgctccaaaatctatttttgaagcaagcataccaaaattcgataatgacatttgcatgcactaacgaaccaggtttagatatatactagtactcatcatgtctacaggtttcagaataaagtcttttgactaaagcaatgtgtccgttatccaatcaagaggacctcaggccacaagacatgaaaaagaacatcaagtgtgtcccacggaaaggacagaaaaatgtctggatcttatatatactccgtagattctagtagtagtgtgctttaagagcaaggtcaatagtatagtctgctgctggctccattatctccatatcattttatagctaatattacagttaactaatacaatagactagctattgtgcttactacatctcatgaaagaaatatttaattatacatgcacatactttatgagtacttacagtgtatgatcaaaagtgaacttcatgtttgtggccattcatgttctgaaacatgagttcttatgtctacatgaatagaattgaatggaagctatcgaaaatcagatggagcgaggtaaaaaagaatacactcagcggcgaaaaaatacacggaaacaaaatccgctttttgtaaacaagatacgcatacatctgagatcaggcagaaatagagaaaaaaccaagaaaagaaaaccaaatccactggtacggaggacatcagaactactgaaccactccctagccgattgtttgttttaatcaacgaaatcacccacaagacagcaagatttaggctctgtttctttcagcttaggattattataatctagattattgagtcagattactataagctagattgttataatctgtagtaaaataagcggttagttgtttatttcctagattattgggtttgcaagtctaaagaggaagtggggtggcatgatgggtaattttttacccaataatttggaaaaagctcacctaaatgagcttatcagattataataagctgggttccagattataataagctacttcaataagttgtctgtttctttcagtttactctcataatctggattataataatctcaagttgaaagaaacagggtcttagcatggagacaacgccagcttcatgcggtgggcgtcgatcaagcgaccggcgcagatctagcacacagtggtgtcgcccggaggctggaaactgggatcagtcttttaatgaacggaagagagtgccgacgctttcagatggccttcatctgcacgccgcggcgaacggtggcaccgacggcgatgctaggaagaagcgtcgctgcatcggagaagatatggaggaggaagaggagagcgattccgcgtgcttgatctgaacctgtgttgcgcagttgcactgctcggcaatgggaaatactacttgggcggaaggagaaggagagcaaaccacacgggatcggatggggtggtgtggggcccaaaaaatgtatttttaatcgctagtactagttgcatgcgcatatggagccgtgctatcgtcggcgctagattagtcgtccgttcccttcctttttctggtttatctttcctccacgtagaaatacgatgatatgtaactttttgaagcctgttgagttattttattgtaccggctctaagcgcaaggatctcgtcctcgcgggtggtcacatcctcacggtcacggacaccaattgacacccaataattccatggcaaagtgccaaagtagaaacatgagcgagtacaagcatgtgggtgatgagaggtacatctgatgtaaagattagacgaatgaaaaaccgagagcaggtttgttccggggaaaccagctactggtgtgaatgcccgtacctgaatgctagtaataactaggaataaacagacagaatttggtttctttctttagataaagaaattgcttgcttgatcaagagaacagaccagggattggaagctcgctgcacgggtccaacagcaaatcagtatccatgcttatcaggttcggaaatttgtctggagctcattcctgacgatctttgaagtagtattagtactagtttcagactctcaggaaacatttgtcaagtaaaggaagatttgctacatcaaatttgatggtttgagtatgagctcaagacagcttcacgcgcgagtgtacgcctgtacgtacatgtacaatggctaatgcacacactcaagtcaaaagtttaaggggctgtccgtttggcgtctacggaccaacggatttaaaaagctggttaaccaatacacttttaaccggtagttcatcacggcaccaagaatcaacgtgtattattgacttgcaagaacagaaaaatatcgacatgtactaatctgcaagtccgaccttccaggacgatgtgcagtgttcctcacgaaaattcgacgagcaccatcatccgattgattgaaaaactggtttgcatctaatcataagccgtgcaattattgtcaccccgatggtacgagcattacggaatgtattcacacctgccattggctgtaacaactgcaccatttcatgaaaaaaaagagttcattttcttctccatcttactacagtggcttctgttgtttattccattactctgttttttttttcaaatgtatcttcgattggtcacctaaggcagacgagagggcccaaaaatgatcgatcgcatgattaggacgccggcagatggggattaaacggtgggcttgtttttttagagccgaagacagcgaagtttaaagaggcagtcaagcaaaccagcgaggcagcgaagcgggcttaagcttaagccacctctcgtcacgcctccaaacccacttctctcccaccaccgagaccgccgcctattctttccttcctccctctctccggtctttgcttctcgcgaggaagttggcatcctagatacatactccttccatggcgccgtcccagatccgcttcggccaccagatccccttctcccgccccgactccgacgaggaggaagaggaggacgacgaggacgaggaggtggaggaggaggaggaggaggaggaggaagaggagtacgaaggggaggaggaggagatggagggcgaggtgccggtgtcatcgccgctgatgctgccggcggcgaggggaggaggaggaggaggggtgtccgtcgtggagacggtggcggcggcgctgcggaggtcgctgctgctgtgcagcagcgtgcgcgccgcggaggacgaaggggccgcggcggcggcggcggctgctgcggggatgcagattggccggcccaccgacgtgcggcacgtctcgcacgtcaccttcgaccgcttcgtggggttcctcggcctccccgccgacctcgagcccgacgtgccccgccccgcgcctagcgccaggtcagtgccgcgccattgccttgcttcgccttctccatgctccgtggatttgaggcgggggctctggaattggagttccgctccggagatcagcatctgcggtgctactacctgtgtggattaagcccattttcaccctgcactgctgttcgtttccgaattaagttcatggcatgatgctaaatatagtgccacattgccgcgtaactaagcaaaagtgcacacagaatagttgcctcgccgagcccttattaccgattcggaattggttacccacgagcgacgagccaataggactgttacgtttgcaaactcttacaggaagccagaactgttgccatttccaaggatggcactgccaagttcgactactggggaatcttgtaaagcacattccttttgtggagatgactctctttgtccttgtcaggcattgggatgttgtgatatattcctcagtcccaaaatataagcacttttagcatttgaaatttatgccaaaatataattaattttagcactatttagaatactgcttgtcccatctatcactgttttaattttactatcttactctcaaccatccgttggggcaccaaagtcttttttccgaacaggcaagggcgctccatatgtttcatcttttgtagttagttgttaccccttactgattcctatcctggtattgttgtatgtatgatacataacctttcagttgtagaggggaactaaggatcatttctgtttcttaagttcaattgttataagttcttttccttaaaagaactttgcagcctacctttattagtgaatttctagcaaagctcagaccctaacttagtttatgtttaatctatttccttacacagtgtgagtgtatttggagtttcaccaacgtccatgcaatgctcatacgataacagaggaaacagtgtgccaacaatactattgaccatgcaaaagaagttatatcaacttggggggcttcaggtaaggccaaatggccaacaaattttggaaccttaataatactagcatttacactactcagcaaaaaatggaaaaaagttctgaaattctgcttcttgttttcccaggctgaaggaatcttcagaataaatgcagacaatagtcaggaactacatgtcagggagcaactaaacatgggtgttgttccggatggtgttgacatgcactgtctgacgggcctcataaaggtgtggtgacaattatttcttgtgcttttaattaacctttgatttatttaccatatgttttaaatgcataaaacccaaccttatggaaatctttctctatggaaattgaacatgtacaaagccttcaaatatgataatgcagacattgtttatgcagtacagagatttagatataagatttcagacagtaatcaatagatagactagactctagagtatctagcgcatacatagactaaattatatttttaagaagtctacagaaaaatgagtttttgtattgttactttttatctgtttgttctcttctacaccattccatgaccggtgtgatgctgatggtaggcatggtttcgtgaacttccaagtggagtattggactcattgactccagaacaagtgatgcactgcaacactgaagaagaatgcgctctccttgcgagtactctacctccagtggaagcagcactacttgattgggccatcaatctgatggcagatgttgtggaacatgaaaactacaataagatgaacgctcgcaacattgctatggtttttgcaccaaacatgactcaggttattctcaaaatctatttggctttatttattttttcttgctatctacagaatttgctatttcacagactaatcatgtaacataccatctcttttatagatggccgatcccttgactgctttgatacatgcagttcaagtgatgaattttctcaagacacttatcttgaagactgtgaagggacgggaagaaacagctatgccatcaagtgcattcccatcaagctctggttccccaagtgacaaagatgaacctcaggcattagagcatttggacaagcccaccatttgttcaactcagcaaaataatgattttccaatgattagtggggctactcttgatcacttcctctttagagcagaaccattgcgtcataatgacgcacaaggtagtgctggacgacccaagaaacgcgacaataaggaccatgacaacagcagcagggaattttctcccatagatagtgattcaagtagccaagccagcaattctgcaagcaaattcagtaatgacaatgtggaaggtttatttgacagatttaaatttcggaaaggagtagggaggctgtgcagacaccctgtttttcagttgagtaggtccatgaaaaaatcaggtgaagcgggacaagcctgtgtatgaagtaatgacacgatagggtgtagttgatagtttccattatttttagaggcatgtttacttaacatttcatcaaccattgtcctagatttcgtgagtagaactgtagaaggtattagccaatttggtggtagtagtactgaactactgatgtcgagttcctgcctgtatatttcaactattcatttctgaccaatcaacttgtacgatgccatcattactttcggttgttagttatacttgttactaacagaaatcaagagtagccttagcccctttccaatcaattgctgtgcaagtgatttgaatgggacaggtacaaaacgccatcatcttcagtactccagttttgtggtgctggtaagcgctatcatcttggtttgaagctagtatcattttgatttgagcccctaccaaaatatttagcactatcaaaaatggtctggtctgaaaccaaaatgtgcccacaagacaaatgccaagcaataacaaaattttggtagggtaacatttcattgggttttagtacgggcagaatttggtagacttcaattcaatacggcccgaagatagcagggcagatgtctaatcaaacgttgctcagtttttcagggcatgtttggttcgtgccaaaccttggacaagttttggcttttttgggtagggaagagtaatatcaagttatcaactatattgatcttggcaaaaattggtatcaatccaaatgacttttatatacactattaaagttgccaaaataattttcggagcaacccattggcttcggttttgggcacaactacaaatgtgtgaagatgatgaagagtttctgaaagttgcatatcgaaagttggagactatggttatacaactttttgccaattatggttggagatttacaaatagacttcaataattgtaatctccttatgttaggctagattctttattgttccttgcggtgtgttctattcaattagatttacactatgttcgtcaaacgcttctatgtaataattggctgtaactcttttgagtaaaaaccgggatgttatattccattatctaaaaaaaattaaagttgccaaataattgttggggcaaaatttggaaccaaaccaaacaggccttcagtctttcacccgttggactgccgcattgaggaggcgttttgcgggccgtcgggccgagagagagagagacatacaactccaaacttcacgggcccttatggatcttgtaaactttgcctcgaaatgaattcttgtgtttagactggtatgtcgaagtgaatggtttacttcaagtatgaaaaaattgaaaattaaagaaaaaaaaagtacgaattcccccccccccctcctcgaactatcgcggtcgtccgaattactcccctgaaccacaaaaccggacattcttcatccctaactatgcaaaccagatgaattaccccccttaatccaatccacggtggtttttgtctacgtagcgtatacgtggcagtccagtcagcattctaattataaaaaaaaagtgggacccatctgtcatattctcttctactgttcctctctctcactcttcctctcctctctctctcttctctgtctcactcttcccctctctctcacacgcacggcggcaggcggggacacgaaggggcggcggcggcgcgcacgcacgcggacggggccggaggtggcggcgaggacggggacgtggccgagacgcgcacggcggcgaggacggcagcacgcacggcgcagcggcgcgcacgcatgcagacaggggcggcggcggcgaggatggcggcatgcacggcgctgcagcgcgcacggcggcgcgcgcgcggcaatcaaacaatgaagagttcacgccgacgacaaaacaaagcaatcaaactgcaggtctgcaggacattgacaaatcacaaaaatctttctattctagcggctaaaagaattgctactttgtcggggattttgtaccaagggggaaatcaagaagcggcggtggtgtgatcgaatcgatcctcaaaggaaggtggttccggcgaagccgcggtggaggaggttgtgggcgatgttgtccctgttgcgcttggcggcctcggagcggacgggggtctccggcaaggtctcgtcgttgacgagctcgtaccggagctacggctcgagctcctcgccgcgcgtctcgcagatgttgtggaggacgcagcaggtgccgagcacgacggggaggtcctggagcttcacctccgtgcgcttctggaggcacgcccaccgcgccttgagcgcgcgaacgcgtcgacggcgacgcgccggaggtcgcccaccctctcgttgaaggcgtagatggggcggcgcgtcgaggaggacaagagcgctcggggcagagggaggtcgaggcctcgagcctgcggccgcgtgcgtgccgccgtcctcgccgccgccgcccctgtccgcatgcgtgcgcgccgccgcgccgtgcgtgctgccgtcctcgccgccgcctccggccccgtccgcgtgcgtgcgcgccgccgctgccccttcgtgtcccccgcctgccgccatgcgtgtgagagagagaggggaagagtgagacagagaagagagacaggagaggaagagtgagagagaggaatagtggaattgaatatgacaggtgggtctaactttttttttataattagaatgctgactggactgcaggtatatgccacgtagaccaaaaccaccgtggattggatcgagagggtaattcatcctgtttgtatagttgggggtgaagaatgtccggttttatggtttaggggggtaattcggacgaccgcgatagttgggcggtaattcgtacttttttccaaaattaaatgcagtttgagatgtgatactcatacaaaccagcgttccttcagtcttaggagatgatgggcatgattagcttgaaacagattgcactagcgaaattcttttctttcccttccaattctagtttagacttctaacgatgaacgtttcaatcaaccaacagccaagtggaccctcaagaatattgttagcaatcttggtacgatctagctgatatgccttggaagcttcctgctacgtaaatgtacaacatgggtgcgtatcttcaatccaccaaaacaataatagtacgtgtgacgatctttttgtcccaaacactcaaacagcccatgttgaagctgttggctctggtccttttctgttttggattgaatcaactacctctttttctctaccaaaaaactgaatcgtgtgtgcccgtggggtgtggagttaggctctcacgatcaataccgtcattcagagcagagcccagctgtctcgggctctcggccccgtacaattatccacacgcgcccgccatcgacctcaccatgcgatccttaactttgtcattttcgggaacgcattatgcatgtacttggaacactactgtactagtttctcacattttgttgcctaacttaagaagctcctccatttactctacacatgcccgtgttcattcatgcaaacagaaacgaccgcagcgaaggaaactcccgcgcagatcaggctccgccactgtaactttcactaagaattaccattgatgttcgaaaaatagttgataatcaaagaaacgttattagccgttcgactcaaccatgttattggctctgctgctgcacaacagaacagagcatttaccaagtcaaatcatggccagtcgtggacttgaaagtacgccacattttcgcgctgcccttaacttatcaaatctcagagactacctacaaacttccgaaaacgacggcagaattccagcagaatgcatgcacagcaattaacagcctaacagaagacgcgcgtccggaaatcaccctgccgtgcacggcaaacaccaaacggaaatgcatcagcgatgccccgagctgaccagctacgccaaacgccaaaacggtataccccgaaattgcagttgcaaggagccagggaccaatggaccatcagcccatcgcgagaagttaatggtgctactgtactatccaacacgtagttaattgtaaacactgtactaagcagtatacattttgcagacaggacaatacattatacaaccatacagtcatacagatacagatcagtagctttgcaacaagagaaaatcttgtgcatgcgacagcctgttttgactgccttttgttttatattgggtgaggaatcatttgacggcccgggttgtgttctgtgcaacgagacaatcccggcattgatcccttttttcccctggattttaaccgtgtgcaatttgggaggaccacgcacttgcggtgcacgcttgccatctccgttgctttataagcttgcagcgcgcgagccaacgagagaaaccggaagtctcttttgaggttgcaacgcacgcacagtttgcatccgcagcttagctagcgagtgacgagatcacagggcatgatgagtcctggcgtttcggccaagaagcgccacgccggcgcggggttcacgctcggctgcggctgcaaggacgcgaagagcgtgtccgtctcggcatcggcggcggggacgccgtcgacaacggcgacgcggcgcaggagcgccgggacgaacccgtcggggtcgacgacgacggacactcttaccatgacgtccgcgtcgtcgtccttcctctgggagcactccgtggtggagttcgaccacgacggcggcggcggctgcgggccggagagcttctccggccttctgcgcgagctcagcgagctggagcagagcgtcgcgtcgtggggccggaagagccaccaccagcaccacgacaagaaacactcgccggcgccgtcgtcgccgctgccgccacaggaggacaggaaggagaagaacggcggcaacggcgatgccacggacaaaccaggagactgccgcgacggcggcggcggcggcgacggcgtcggtgtggctctcgacggcagcgtggcggtggtgaagcagtccgacgacccgctgggcgacttccggcagtcgatgctgcagatgatcgtggagaacgggatcgtcgccggcgaggacctccgcgagatgctccgccgcttcctcaccctcaacgcgccgcaccaccacgacgtcatcctccgcgccttcgccgagatctgggacggcgtgttcgcggctactgcctccctcgtccaccaccaccacccgcccccctcctcacgccgcgagccggtggctccggcggcaaggccgcccgcgccgaggacgcctccgcgccaccgccacccttcaccacgggcatggcgcgtgtaatcgtaacgcgtacgtgcaacgctcgcacgcgcgctgtgtaatcacccgcgatgtgggttactccggggcaatacacaagtactgctactcgatatcaaattggagattagtccggtgacaccgtgcgtgcgtctctgtgctttcgcgcgtcctcgcattttgtctcgtgtcatttatcttgcggtgtgtgtggtacactggttactggtacaaatcatgaagccgaaaagagaaggacgggggcaaagcggcaacggcgtacgaaggttaggaccggccggttcgggggccggagtcacggacgatacgggcgcgcgagttggaggggccccgacgcgcgggcttgcacgtacgcatgcgggtggatcggcggtgggtggttggcgcgcgcaggcggcaacgacgcgagcgagggccgagggagtgggactgtgggagtgggaaggcaaggcatccacctcgtcctcgatgtcatgcgtgcttgtcattccgcgtccatcagcagcagcccatcacgggcactgaattctgatgtccctttcaggtaacatgtacgggttcccgattcgccgtcctccgacccgggcggtggttgcttgtcagactcctacactgcaacaaaattaaccgcaagctgtagacgaatggctatattggaacaatggaactggctgtgtggtaaagtgtggcgaaacaatcatcacgaactgacgggagaatggatccaggggaaatatttttattttagttcttttttaaaaggggatacgacggaatcccgttttcgaacgggatgatcccgagtaggtatcaggtgtgatacctatcaggtatcagacgattctacacacgtttcaggtgatacttgcaaagtatcatgtgatacttatcaggaatcatgcgatttctaccacgtatcgtgtgatactcgcgaggtttcatgtgatacctgtcaggtatcagacgatttctacctcgtatcgcgtgatactcgcgaggtatcatgtcaggtatcagacgatttctgctatgtatcgcgtgatacttacgaggtatcggatgatacttaccaggtatcaggtgatccctagtagatataactgtacatcccgttggggagagcatcccgacgcggccggccacctacagccgtcccctgtagacgaggacggcgacggcggcagcggcggtgggtgcgggcacggcggcgacggcgggggacgggcgcggcagcggtgggggacggggatggtggcggcgggggacgagcgcggcggcggcggcggcgggtgcgggcgcggcggcgacgggcgtggcggcggcgggggacggggacagcggcggcggtagggaacggggacggcggcggcgggggacgggcgcgcgctgatggcttcggccgtgtcgcatgggtgagaatcgcgtttgtgggggaaaagcatcccgttgggaaacggtatcccatcccctagcattcccgtttttaaagccttattttataaatagatccttaggaaaaccttattctagaattgaatccttatggtgatgttagcatccctcttgttcctaagaaaactaaatcattgatgtaaaatgatcgacgcaaatgacactaacgtcaaggggatggtatcatcatattgtccatcatgttaaaccacggcgttaatgacgttggtgccgcgaaaggcatatatttatgtaaataagaagttaagtaaagtctatcaccggtccctaaacttgtaccactgtatcatcccgatccctaaactcgcaaatcgaccgttcagattctcaaacttgtttgactgtgtcatcccggtccctaaacttgcagatcactcgtttaggacctccaacttgttcagttgtgtcaccctggtccctaaacaggacagtctaaaaactttatatcaaaaaataattcataactttttcatgtgaactctaatgaagacaaactttatatcaaaattgtagcccacgacgcgacctacaactttgtagttgaaaagtttttgaattaaaactgtttagggtcccaaaatattgttgcatgtttatagattttgaaattttaattttaaaataacatattgggacaaaaaaaatgacttaaaataaaaaaaattcaactacaaagttgtagatcgcgtcgagggctacaagtttgatataaagtttgtcttcattagagttcacatgaaaaagttataaattatttttaaatataaagtcttttagaccgtcctatttggtccagatgatatacaaatccaagtttagaaactggtgtgacacaactgaataagttggaggacctaaacgagtgatctgcaagtttagggattgggatgacacagtcgaacaagtttgagatctgaacggtcgatttgcgagtttagagactgggataacacaacggtaaaagtttagggaccggtgatggactttactctaagaagtttttctagaggtttattagtaaaatatttttctaaaaaaaataaaaatcctgatggatcgatctctcacctgacgatcaaccacacgtatcatatccccgccgattcaggaactgaacatgagaacttgggcgtccatgaccatgatgcatgtaatgatgtagtacatgcgacattggggaataacaaaactacaaatgggataacaagatatcccaaaacaaagggaagaacaaaatcctggcaccggaaactcaacgcccagcaaggaatccgggaatgatatcagggcatcaggcaggcaggcatcccgtcccgcgcatcccatgccgggcggtgcacctaatctcttcccgagacaaaggccacgggctcgaccagggccgatccctttgtttgttgcttcgtatggaggccatcggcacgggcgcgaagggaacaaattagtccaagctggcctcctgcttacggccggggccatcggaagagacagctagcgcgcgcgcgatgcaggtcgcctcctccgcagcctgcttggctcgcaagcgcttgtctccactcccgtctccggcatcctcccttgcgtcatcacggtcgccgctgaccgatgtgctagtagtagtatatacactcatttctgatctccaagaaatgcttcttcatcagagcaagcaggaggcaatagcttgggaatccgattcgttctcgcagaccattataagcaggcgacgacggtgagtttcagagctcagactttcagtctccccctagctaagatagtccgagtcaagttaagctgaggcagtagtatcagagaatatctccgggtgagatcgatagggtatggcatggatcgagtacgctatggaccatatctgttcttggcctgtgcaccctggttccagcagtgttccgaattaatacaagttgaactggcaacttggacactggcgagtgggcgcgagattcagatgcagcaagggtgggtcggtcgatcatcatcatcaacgtgcagtctgctgtttcttctgtcgtcacagtttagcaactgtatttcaatatacctggcaatactcctagccttcgacaaagggcacagctcgtcaggattaacagcggtgacgtcaactgtacgctacagtgtcagttgatgagtatagctagcttttgtcacgactcgctgataaattaacccggccggcagcatcctgatcgatgttagtggatctgcaaatctatttcgtccgtagtacttgatcgggactgtagaaaagacgaccaggggcatcactgtgtcaatagatatcgacagcagcaaagaccaaagagggcatgcaaggaggcacgagttaggttaagcggttgtctccttgaaccagttggtactcgtctgtagttggtgctccaactttgatcagtatcagcaaattcagcatcctctgaactccgaagaacagccggtggctgaacctacaagcccaaatatgactgtgacaaaagatactccctccgtctcaaaataagtgtagttttacactattcacatttaacgtttgaccattcgtcttatttgaattttttttatgattagtatttttattgctattagatgataaaacatgaatagtgctttatgtatgactaaattttttaaattttttcataaattttttaaataagacggacagtcaaacgttggacacggatatccacggctgcatttattatgggacggaagtggaggtagtaggatgaatctgacagatccggtaaagaataatgcttgcacagaaatcctaggagttgcaggatccaattctgctgcattgcgttgttttcagtatgcagtcgttacaggcgtacagcagtcggccaaccagcccactctagtgctggttgctcgcttgggtccccatctggtgcccacttcttattataaggccctgtttagatgggactaaaacttttaagtccctattacatcggatgtttgaaaattaattataaatattaaacgtagactattaataaaacccatccataatcttggactaatttgcgagacgaatctaatgagcctaattaatccatgattagcctatgtgatgctacagtaaacattctctaattatagattaattaggcttaaaaaatttgtctcgtgaattagcttttatttatgtaattagttttgtaagtagtctatatttaatactctaaattagtgtctaaagacagggactaaagttaagtccctggatctaaacaccacctaagtcataacggtttattaggaattaaaaaatgatatgttcttactggttaaaaagccaaagttgaaaaagaactatgttgaaaaaatattaaaatcaaattcaaaaataagttttaaaattcaaattttggctttggcttctaatgaggcccttgctcttgcacggcacgcacaagtatcagtatgtatagtactagtatcagagcaagtacaataatgagctaatagcctgcttacataagattttaacatacgtggcagagagagaaagagcggagagataaaagcgaacgactatattatcaccggctcaggcgcgagtgcctagaaactttctctgagggcacccacaatggttatctataggctctctacaagagatccatgtcagcatattttcctacttggaatgtattaaatgaagagagagagcaaagctatctactaacttagagatagtctatagagaaaaacgagacaatgcatgagagagctatagatacaaatgtagacatactattaaggtggtttactattaatcgagtctattgctgagatgtacatgttttatagatagcaccttactttaccattgcgggtgctctgacgcagccctgtgcaagggaagagatacctgcgaacagccaatagaaagatagaaccttacgttgggtaaagcaaatgttatagccgattactgtatttagcgtggtttaattagctgttagatgacgtggtaaatttttagcgcttacaggtgactgtactatttaacttactcttagttcgagtgtccgttccatatcactgcatttacagtggctggggtttcccagaaggaataagttcactttaggtccctctatttgtcggtcagttcgattttcgtcccttgacaacaaaaccgggtacgacccgtcccccaacttacgaaaccgggcaaacaaagtccctcggcagtatggaggacggttttggccgatgtggcatctatgtggcgcctacgtggctcctttgactaggtcttcatcccaagtggcattgacgtggcgattacgtggcaattttatctcgaaaaaataataaaaatagtgggacccatatgtcagctacacaaaaaataattaaaaaaaggtggggccatgtggtcccacatgtcagcctccttatctctatccccctctctctcccccctacactgccaggagagaagggcgagcgacggtgctgagggggcgacgggcggagcggcgatggagcggagtggcgacggagcgaagcggcgcagcggccagcgatgaatgaagtgacggcgggcggtgggtgacgggaggaagcggagcggcagcgcggcgaaatggagcggcggcgggcggtgggcggagcgacgctgatgacgccgctcccgccgccccccaagctgagctcgccggctcccctcacctctccttctccactcttggctcttcctcttcttcctctcggctctccctcgtccttgcggcggagcggcggtggcggcaggccacggggcgggcggagcggcgacggacagcgcatggctggtggcaggcgacggcgcgtggggtcgatggcgacatcgggccgtgcgaggaggcaacggagcaagtggagcttctcgtcctcaccaccaccaccaccaccaccagaaacagcggagccgccatggcgcttgcggagctccgacaaggggagggtgtcggtgcggccgtcccggccgcggtggcgaggaagtagagtcggcggcgcgggggagcgggagcgagagggtgcggcggagggggaggacgacgggaggagggccgcggcgactgagggacggggagaggcgcgcggcttcgatccctcttctcccgccggtggccatcgaggagaagggcggcggacggctcggcgagcgtgcgcaagagagatatggctgccgccaccccaggcgcctcgcgtgccgtcgcccgccgccagccatgcgctgtccgtcgccgcgagggaggaggcgagctcgtcggggcggccggtgggagatgaggcagcgcacgccggctgatgggagggagggagaggagcggtggtgcgcgagcgttggcggccggtgggagggcgggagaggagcggcggcgcacggggaccagcgggagggagtggcgtgcggcgacccgcaggtgggagggagaggagctgccgccgtcgcctggagagagaggagaggagagagagatgaagagaggggagatggggagagaggaggaagaagaggagggatgagttggactgacatatggggcccacgggttttattatttttctagatcggattgccacgtaagcgccacgtttgtgccacatcagatgaagatcgagtcaaaatggccacgtaggcgccacgttagccaaaaccacccttaaaactgctaagggacctcgtttgtccggttttcgtaagttgggggacgggtcatacccggttttgaggttcaaagacgaaaatcagactaggcgacaaatagagggacctaaagtgaacttattccttcccagaattacgggtagttgagcatagccacggggaaaaggattggagatgtctggcagactggcactctggcgcacatttgtcattcgtagattggccgtgggttgaaacgatcagatctgggcctctggcccaaatacccgaacttattggaataagttcactttgggtcccttctatttctagtccagtccgattttcgtcccttgaccgcaaaaccgggtacgacccgtcccccaatttacgaaaaccgggcaaacgaggtccctcggcggttttgaaggtggttttggctgatgtggcgcctacgtgccttgtttgactaggtctctgtccgacgtggcattgacgtggcgcttacgtggcaattcaactcgaaaaataaataaatcttgtgggacccacatgtcagtttcacatagaaattataaaaaaggtagggcccacgtgggccccacatgtcattctatccccttttcttccaccgcccttcgccgcccgcgcccgccgacggttaccgacgacgtgactccatccgccgccacagcccagcgaccagcggcgtcgcctgcctccctgacccgccatggccacgagttagtgcaagcgcacccgccgtcccgccgctcccgccgataaggaggttcccctgttgccatgctgtatcgaagataaccagcaatgcttcctccctgctccccgtgccggccatggcaacggtctcctcttcttccctctcgctgcctcctctctcctggtccttattcttcatgatctccgtgtccttcatggcattcgtgatctctccagctggcgtctccacccgctgtacatcctccacgcggaccacgccgcattcttggccacctgatacgtcggcgcgtttcgccggagtcgctgcctctcctttgccgtcaacgggagccttgtcgccatgcacgttgttgccaccgccaccgccaccgccgccgtcgtccgccgtgacgacctccaagttctcgagttccttccgagcccataggagtagctcatacgcatatacgccgggtatagatggccatatggcccgaggcccacggcccggcacgaagcccgcaattttggcccggcccaagcacggcccggcccgactagggtcgtgcccgtgccggcccggcccgacagccgggccgtgcctgggctgcaccctcggcacggtgggccggcccggcacggcccgatcaaataaaaaaaatatagggacaaaaaatagacttatataatcgtataaggcatggcccaagaaaataggtatacaaaatagacttattttccagccatttaaacacaacccacagagttgagggaccaaaaatagacttatttccagccatttaaacacaacccacagagttgagggatcaaaaatagacttatttccagccatttaaacacagcccacagagttgagggatcaaaaatagactctttctgtgaggcagcacaatagcccatcgtgccttcgggccggcccggcacggcccgactagtattgggccgtgcctgggccgtgtatgccgcccgtgggctggcacggcacggcccggtgcatcggtcgggccgtgccggcccgacaagcctcggcccaggcacggccgggcttgggccgtgccgtgccgggcggcccagatggccatctataacgccgggtacagacggccgcatgcatatgcgtcttcgtgcgagcatatatatgcatgcatggagacgaccagctatagcctctagctagcttcttgttggtttgccgccaacaacatgcagacgtatatattagccaagcatgtgtatatggctgagcacactcacatgtatgtgtgtgtgtgtgtatatgccatttcgtgcatgactcatgcatgagtcatatttaattcattagcttgcttagcacattagcgttgttagctagctaatttacctgcttcctgcaaccagccactaacacacaatatgcgagcgcggcagaggagcggcggcgggcaagcgcaacagtgggcaaagcagcggagggcgagcgcggcggcggaggggcggcgggcgagcgcggccgcgggcagagcagcggagggcgagctaggcgaagcgaaagacagtggatgggatggggagctcccccgtgctcggccgccaccaccgccgtgccccgtgccccagcgggtgccccacggcgccggcgacgaaggcctcgaggccgtcgatcgcgccgtgagcttggcgggcagggactcgacgaggaggacgaggtcgtcggccctgccgaggacgcgctcggtggccgggaagagcaccgcggcgatgtcctggacgacgaggaggtgcctgtccatgaaggccagcgtggggcccaccagatgtgccctaaagactgtgtgaaactgatatgtggggcccacgtgggccccaccttttttataattcctgcgtgaaactgacatgtgggtctcacaagttttatttatttttcgggttgaattgccacgtaagcaccacgtcaatgccacgtgggacagagacctagtcaaacaagccacgtaggcgccacgtcagccaaaaccgccgagagacctcgtttgtccggttttcgtaagttgggggacgggtcgtagctggttttgtggtcaagggaagaaaatcagactgggcgacaaatagagggacccaaagtgaacttattccgaacttgttcgacgtataggcctattagtgccgaacttgttcgacgtgggctagatgaactcgcagcccattgagcccttgcccattgaactccaggtgcggtccaatagcccacgtttttgtttttgagaatggaaggtaattctcattgcctggaattttggagaaagccaactagaagataacaaggtcttaaacaaaagaaaaggaatagcccatgtttcaacctacaaatatctacaagaagtttgtttggtcttttttagataataaatatgtatttggatttttaagccccacgttaaatccgtctttcttggacttatcaattgacttataacttagtctaagtccaaacaaatattctctttgtatttaaacatgacactgttagactttattcattcaaaatttttaaactttaaccatcaatagctccttttaaggcataagaattatatgagtgtttttttcattataattattttaacgatataataattttgttagatagtactccatccgtttcacaatgtaagtcattttagcatttcccacattcgtattaatgttaatgaatctagacatatatatctagctagattcattaacatcaatatgaatgtaggaaatgctagaatgacttacattgtgaaacggagaaagtaccatttggatctaatagaaagctgatagtcaaaattttgaaaaaaaaaagttaagagcattcttaatttgtataagattaacacgctcttaagctaggattcacttgcttgaaaaaatggtctagaacatttcacaatgtttatagctggtgcaacgtaaaaaaataatttgtatcaagcactgactgcttctctcctcttgtttggttctatttttcagtgtgtgtatactgtattattttattgcttgtgtttgggccataagcttatggttactttttatatttattatttatggtctattgccataatatatatatagccaaccaaagaaatcttttcagccttataatcctttttattggcttattgtggctgccctaatgtcaaatagacagttttacgaggtgtttttaaaacctatagctcctatcgcattaataagcattaatacactataaattaggggttttgtttttgcattttgggattggtgtgaggttaggagatttgtccttaatatagttttgtatgtgcagagaagacaggtggggcgaagttgggtggccgcgagcggagcaggcaggaggagtgggacgatgacatgcgaagtcagcggggcggcagcggacagagtaggcaggcaaagtggggcgatggtggcggagcgacaacgcgcgaagccagcggcgcggagcggggtgatggcggatgaggatggcgatagcgacaagttcgaggaggaggagtgggacgatgacgcgcaaagccagcggggcggcgtcaggcagagcaggcaggcgaagtggggcaatggtgggcggagcagcaacgtgcgaagtcggcggcgcggaacggggtgatggcggacggcgatgacgatggtgataggttctaggaggaggaggaggaggaggacgcgcaccacttcttcctcttcctcgtctcctccatcttcgcgccgccgtccctcaccacattcgctgtcgccgtcctccgcaccctgtctccgctgtcctttgcaccgccctccaacctcgacggcttccttgcataggcggcggctcgccacgctatcccctcgccatgggcggaggaagtgggacccaccacccgcacccagctgctccctcgccgctcctcccccaccgcccgcgtgcagctcctcccgcgacggcggcccgcgcatagctcctcccccgtcgtctgtgcccgccaccggcgaccagctgctcccctcggctgccgcccgtacatagttgctcccccaccgcctcccgtggagaggagaggagagaggaagagatgtggagaggggaggggaataagaggctgacgtgtgggcccacgtggatcgcatgctgagtcagctgtcacgtcggataaaaccagagtttacactggttttgtaagttgagaaatgcgttatatctggtttcgtggtttaatgacgattttataactcaatgacaagttaagagatcttcggcgtacttttttcctataccttcctccccagtccggctctccgaggtccgagcaacggaatcgagcaaagtatcccccactcccgaccctttccgcatcatcacgctcacgcagcccctctgttattccctccctccccctcttctggtccttctgtccccggcccggcccgtgcctcccccagtcctcctctcccccgtctcccgccgcctagcgattcccggagcgcctcctccgccacccatcctgctccaatggcgcttccttacctggaggccgtgctgtgtaagatttcctcgcctcccccatctctcgtttggtgcggtggtacgctcgccttgatcgctgatctgtgtggggatggcgtcgggtttcggttggaacgggggatccgtgcgtaaaccctagggtttttgggtgggcgcttgggtttttaatctccggctcgatttgctcgtgctgtggtggcgattgggcgtggcggcttggtggtagcgggtagggtggattaatctaagttgagtcgagggagcttaatgcgattggcgatggcgttggcgctgggggagaagggccttggcgctgatgcaatgaagttgctgaatgtcggtatcgatgccatgttttatgttgttcgtgattagctgttcctagtatactggtttgcttttgtgttgatgatttgctgagtgcccatcattcaatgatgtgattataggaaccggtgaagtgaaaatgtatggcacagacgcttttgttcttaataaatacagtgaagaccgtctgtgattgagtgtagttagagtggagatgtgcgatagagctgcgaagtcatcttggcttaattgatcatgagggttgaatttctgtatttttgttgtgttgcaacactctctatcatgcagtaggatgcaatatttgtagagtttgtggtgatttatgagtttaagatggcaatatctattctgaaaagaagttacttgtaataggatctgtgacttgcatatgttagctaagactcatgcctctcgagtgaagtcaggtcatggtatatatttacattcaacactggatattgtatatgatgaaataattttttaaaaatttgtattcgttttgcaggctttatgattctcatgtatatatttgagacatatcttgacatccgtcagcatagagcccttaagttgccaacactgccaaaacccctggtaggagtaattagtggtgaaaagtttgagcgctccagagcttatagccttgataaaaggtatgtgtaatactgctctcaccttttgcaaccttacattattcattttactgcaatcgttctaaagtaattcagactgccaattttttggattttgtgtgttgacatttatgctcatgttacagcaaattccattttatccatgaagctgtaactatattaatggataccacaattctgtactatagagttcttccctgggtttggaaggtaaaacaaaatcaatcagcttgcctctgtaaactctttatgcaagtattttgttgtgattagccttcttttgtagaaatctggagagctagcaaccaatgctggcctaaatgctgaaaatgagatactacacactcttgcattcttagcaggtgtcatgatttggtcacaggtatagaataattacttgtacctgccaagcatcttatatgtttattgcacatatatttttaccttcattgcattcaaaattaaattagcttccagttgtcttccagcacattgagttaggtataaactgaagccttagctttccatgattgacaatcgctagctttagtttaacacaaatggtggttgctggattgtctatgtcgttagttactgcatcaaaagttattattagtcaggactgaagcgcatagcatagtgacacctatgaaactattgacatgcatttccctattctgcttttggccctgacagacatgaacagccactctagttcttctctgactggaccatttttcaacttgaaaaatagtggcaaaagttgcctgtattttcttaaatttgcatgtatcaagatcaggatatttgagataagagtcttatctcaaatatagcgcttcgcgaccgctataacagcccgctattgactttgttggaccattataacgcttaaatgttgttcttcatttatggattgtagaactttacattgtttatcttatttatcttatatatctatatgttatttcatactttttatgttatgaaatataggagtaattaaaaatgtatgaatttgatgttaatattgatatatttatggttattttcttatatttgctattggaacttagcgtccgcaatagcgcccgctatccgcaatccgctacacagacactaatccgctaacaacccgctatacactatttattaccttggataagagtaatcatccttttgcccttttctgttgagtacatccagtgacttttacatgttaatctacacctatgttcatagttgcatactgatattgattgtttaggtctacatctactagaactttggcatagtgttctcttatggtgaatcaacttcttttgcaagccatcagctaaaacatgccaactccactatttgatgtgaaacactgatacatacttcatgcaatgcagatcacagacttaccattctctctttattcaacatttgttattgaagctaaacatggttttaacaaggtatgtttgtgttctcaattttagcacctcagttattatatgttttaacatttgaatggtgttcacctgcaagattagtgaagtacaaaagtatcttggcttatgaatttgctatgttctaatccccaacatatttattctgaacctctagctttggacttttttcagcaaactatttggctcttcattagggacatgatcaaagggattttgctatccatcttacttggacctcctattgtggctgctattatcatcatagtacaggtatctcctgtctttctaccacacacttcttcattgttggctagtatctggagaacaggcttacctgttttttgcgggatctgggcccgaataccacaaactcgtagaagtgtgtgaactgattagtttatttctctgtgcttcagaatggagggccctacctggcaatatatctatggggttttatgtttgcattatctcttgtgatgatgacaatataccccatcgtgatagcacctctgttcaacaaattcactccggttagtatctttttctgttgtagagcatacctagtatgctgtaattagttcacttgtctgttttttgtgtgagaaaggtacatgcatccattgtgcatcttctaattcgtgtcccatgttattgaactacgttgacctattaataagccgtacggatggcaaaagctcttttgaggtataactagatatggttgcacatattttaacagcttccagaaggagtactcagagagaaaatagagaaattagcagcttcactcagttttccattgaaaaagcttttcgtggtggatgggtctaccagatcaagccacagtaatgtatgttgattactctaccttcagggttgtggttcattgataactgatagtttgtaattttctgtgtgctttgaactgacaattttctttcaggcttacatgtatgggtttttcaagaacaagcgcattgttctctatgacacgttgattcagcaggttatatgctaagttgtttagtttcattataattttgaattacatgcatgaaactcacctggatccttttgtcggtttcagtgtagtagtgaggatgaaatagtttctgttattgcacatgaacttgggcactggaaactcaaccacactgtgtattcctttgtagctgtccaggtattctctttgatgccatgataaactttgcataacaattgttcatctattttgttgatatagtatttgtgtacttctgggataaaaaatgtgtatgtaatccgaaatgtcccgttggttctcctaaaaggacatgcagcatttttgtgcccctccccccaactttatcattgtatcatgtaatgcatgaatgagaactattgttttggttacagataagaaaagtgcataaatgcaagcatttgatcactaggacagggtagctaatttcaatattgtttctggtaaagaatttactattaagaaaagtgacttccctgtttgttcaaagtaaatactgcatgaccatagcatgaaaatcctgactggtgcttaactggtcactctgctggtacttggttttactggtctacccggtccaattggtgaattgtcaaaaatattatattcaaacgtattttaagtctgatcccgcaactaatacactttttttcaaatatgcataatatcgccaaagaataatatttagctcaatccatttggctagaagcccaacatacttgtgagatgggacccaagtttggtttgactcaaaaaactatttcccctatttttaccataactttctttttttctgaccgaaccaaactaggatctggtcctgggtttttccagttggacccgcctggcccctttttttgtactgtgtttgacatgcctgcttctatgatggatatgatgtgtgatgactgatgagtggctactaggttatgctaagcatgccatttccttagatggatgactatttaacaaaacaaaccttggcataaggttagcagaaaaagttactattcaatatccagagcaaataaacagtgtttagcatgtaagtaggattaatggttctttttcgaaattgaatctgtgatacagtccctttgcatctgttgctggagagtactgctgctttttagtacaaagaaggaaaaaaaacagataaatcttcttttgtgtgttgagagttttttcacttcgtctcctttttatgcagctccttatgttcctacaatttggaggatatacgctagtaaggaactccaaagacctttttgaaagttttggtttcgaggatcagcctgtaataattgggctgatcatatttcaggtatgtttactcatatttgtgaagaatattttcttccttagatatacaaagtctttccctagcacaactacctgcttgtactgtgaaaatagtactacaggtattgtaatttttcatttaagtttgcagtggcttgcattttttggtggatttctagtattgctctattacaagttacaacttgattgacatgtccgttgcttgattgtagcacactataatacctgtccagcaccttctgagtttttgtctgaaccttgtcagtcgggcatttgaatttcaggttcatttttctatttcccttcaaagtttctgctactgctgctttataactttcagttgcacttaccttgatataatttctaggctgatgcttttgccaagaaccttgggtatgctcctcagctccgtgcagcccttgttaaactacaggtaaccatcgaaagatccttttgatttattctcactctaattgctagacacctgaaccgcaaggtctgtctgattcttgttctgttacccaaagtactttcacgctcattattcacttgaactgaacatccgcattagcgttctcttatcgtactgtcggttctcgttgttcgtattgcccttggtcacctgcacaaactgcttgcaaatttgcatagcctaatttggaatttgctttcaaatttcaggaagagaacttatctgcaatgaacacagatccgtggtattcagcctaccactactcccatccaccccttgttgaaaggctctctgctcttgaagacgcagacagcaaaaaggaaaactaacggaaagttgatccacctgaaacaccgaagtctttactcttccatgggttaccttacggtgtcatggaatcgtttcaatgttcgggatgttaatggaatgtgtgagtacatgagaagtactgtaagcgttcaaacatttatcatacaggggaacgttggcaactatgtagctctcgattaagatagtttgccttccattaattggcttacagatattgacatatactccttccatttcacaatgtaagttattctagcattttccacattcatattgatgtattaatatgaatgtgggaaatgctagaatgacttgcattgtaaaacggaggaagtacatgtcagtgtattctcctactactttcgacaagaaatagaagtgaatcagctattgaaatgttcagatgcacacgcagcacggcggagtcccacagatgcactgatgtatcttgtacacggtacacccaaagttgcatttctttgctttctccgtagccggtgcacgtaggtacgtatgcaaagaaattagcaaggtatagaacggttcaacttctaatccatttgctgggccgctctcgctctcagtctcactccaagctccgatgctctccctctccactccgtcgtcgcctccgcctcctcttcctcctcgccgcgccaccaccgctcccacccccgtcagcctcctccgcggggcagctgaccggcgggatgcgccgctcacctccgcgctccacgctgccctcctcaagtccggcgcgctcgaccgtacccagcctctcaccgcgtcgaactctctcctgcacgcctacctccaatgcggcctcctctccgacgcgctccgcctgctcgacgaaatgccccgccgcgacgccgccacctgcgcctccctcgtctccgctctctgccgcctcggcgcgcccctggacgccatccgcgcctacatggacatgctgacccaggatgccgacgacgaggacggtggcctccgccccaacgagttcacggcggccgctctccttcaggcttgtgggctagccaaggtcgcgaggctagggaggatggtgcatggccacctcgtgacaagtgggttttgctgtgacccgtttgttgttggctcgttggtcaatacgtacgccaaggttggggatgtggtgagcgcagaaaagctgcttcttggaatggattccagggatgtggtttcttggactgccctgctttcagggtgcgtgcttaatgggatgctagcagaagctctcaaagtgttcgtcatgatgctggaggataacgtccttcccaacaacgttacaatgttgagtgttattcaggcgtgctctttgatgggagagtcaggattgttcagttcattgcatgcgcttgttgttcgcttggggctcgagaatgatgtttcagtggtgaattctctcatcataatgtatgctaagaatggatttgttgaggaggccacaggtctttttgaggatttgtacctgaggagaggagatgtatgccctaattctgatgttctttctgcgcttctttttggctgcactgtttcaggatccttgaagtatggaaagggaatccatgcgcacttgattaaaatgaatgatttgccaagcattagcatcgaaaactccctgatgggcatgtatgctagatttgagcaagttgatgcagcatatgtggtgttcaaaggtatgcaaattaaggatattgtttcgtggaacaccatgatctcatgcctggcaaagagtgatcatgtggatgaagccttggagctttttagtattcttcatggtggtgatggacttgtgcctgactttgtcactgtcttgagcgtagtgcaggcatgttctaatgctggattactgcagcaagggcagatgctccatggatacattataaagtctggatctttgtatgatgtctcaatctgcaatgccctgataagtatgtatgctaagttgggaagaattgatttctctgagcagatatttgagcagatggatattaaggacattgtttcgtggaactcaatgatcaatgcttatggtattcatggagatgggctatcatctctaaggatttttaatgagctgcaggatgatggaacatgttcacccaatgctatcacatttgtgagtctgatatcggcttgcagtcattctggtttggtttcagaaggctacagatgctttcaaagcatgaaaaacgactacagaattgagcctagcatggatcattatgcttctgtagttgatctacttggaagatctgggaggtttgctgaggcagaacaatttatcagaaacatgcctgttcatcccaattcatccatttggggacctcttctggctgcttgctctctttacgggaacattgatcttgcagaaaaagctgctatagaattgtcaatcttggaaccggagagtgacatatggagagtctccttgtcaaatgtctatgccgttgttgggagatggaaggactctgcaaagattaggactgaaatgaagagagttggcttgaaaaaggaagcggggtggagttttgtagatgtaggaggggtcgaaggttttaagtttgtggcagcagatacaaggcacggcgactctgagcaaatatatgcagtattgcgcagtatgaacaaacacatggcagatgtagctggtgatgtacatcaatcgagtctagtgagtgtaattagttgatgtctcaatatactcatatacactgattctctcttttaatttagtaatttactaatgtgtgaaagtactaacttaaagtgacatgcgatatatcgatttgggcatacaaacagtataaattgaaagcaaaatggcatctgaggtgaggacgctgctttgttgtactattttgctcttcctgttaaaactttgtttgtgtgtgttcttggtataattatttgcattttggtttcagtttcggacctgtgctgtaatctgggatgtaaaaaacttttactatgtttaacagtaacttttatttcttctgatgaatgatgatcccgtatgccaccagaattgttgctgaaaatcttgctgccataaaattctaatgttcattgtgaaacagtcaagacacaatctggacacataaaattttacattgcactcggttttattgtttttgccctaaaatttcagtgataaaccacttacataaggacaatttgttcactatgttacaattcaattcctgtaatatgtagtacacttccattttcctatttccgcatcagaagaactacagtgtgagcagctatgctcctgttttcaccaagactgtcgactttctcgtgcgtcttggccttcagattgacgacggatggatccgcccccagcaagtcacacaagttagaccgtattgtctccttgaatgggctaattttgggtttctgcaagatcaatgtagcgtctaggttccccagctcatagccagcttcatgcatcagtttcacctgaaattgcacatttgcactatgatcagagacagatgaagccacctaaagctgcatcaactagcatatgttttgactttaatgatatagcaccaaagagaaagtgcacacgaaatatcaggccagttggataatacactatacaattgcctgatgactaagacaggaccaaatgctgtttaatgcaaaatcaaagaggaaataagctaatttcagttctcaatgttccatgaggtcatgtagagaaatgatcacatgttgagttgaaattctaaagcatggggatactttccatccaaaagtccaaggggaaacatgcagtcagcattccaagcacatgataagcaccttgctcaaattctaaaacgtggaataccttttgccctggtagagtacaaaaagtccaagacctaatttgaaagtcagactcacgtgcaccttatgcaatcaggagctaacataatcaagacagaagcagccgccgatgtttatggtgtttcattctttcagatgcaacaaataaaatggtaaaaatgaactgtctgtcctccacccacaacaacaacattaaggggaaattcttccttttccggggaggacttgcgttagttttgaccaatgcaacacaccgcattgcgagagtgcgagtacagacactttggatgtttggagtctagacttcaaacttgatttcctatctctaattcaagtaggcaaactagttaactagacataagaattcaataatatctgaaactgcaaatttattcagcaaatttgtttaggtgaagcattccatggactcctaaaagtctaaacagtcctaatagcacacaaatagtctaacatgcttgcagaaacaaaatcgaattgccttaaaacaatgaactgaaaagtggttccagagctcgagaaactcacagcttccctcatgaacaccgacgaatcggcgcccttccaacgggggtcggagtccgggaagatctgcccgatgtcaggcagcccgagcgcgccgagaatcgcgtccaccacgcagtgcagcagcacgtcccctgcgcgcacaaagaaaggccagcgacggaacgagtcaaggagcggaagcggaagcacatagagaagagaaccaagcagcaacaatagccaccaccaccaccaccaccaccgcgcccgtaccgtcggagtgggcgtcgcagccgcggtcgtgggggatgtcgatgcccccgatgatgagggggaggcccggctcgaggcggtggaggtcgaagccgtggccgacgcggaacgggagtgccggcggcttcggcgccgcggcgaccgcgggctggtgctcggcctggaccgcggccgcggccaacgtcgacggccgccggaggcgcagggacggccgggcaggggaagccgagggtgtggaccgggcgcgggctgtcggcgcggtggcgacgggggaggcgaggaagagtgaggaggcggtggccatggcgtcgtcgcgaggcgagatagcgcgcagcgaccgagcaagcttggctgttttgtttgggggctttttcggctgtggaatgctaagaaaacctgcggtttttttgcgtgcgccggaagccccgaagtatttgcggtaaggcgaaggcgagacgagcatctggcaccggagatgcgatgtgggcggggacactcttatattttttttcttactaatatatactccatccgtttcacaatgtaagtcattctagcatttcacatattcatatttttcacatattcatattgatatcaatatgaatgtgtgaaatgctagaatgacttacattgtgaaacagaggaagtaactaccattcattttatttaattttttttacaaaatttagaaatataaataatacttaaagtccctttagtaacaaataaaaaatatttacttaaattttttaataagacgaatgattaaaaagttaacgatattatatattgaaaaggtgaatgtagtacttattttacaatttaatacttttcttttaacttatcagcaacagctaaaattttattatatagttgatgtgagggttttttaaagcagtttttttccgtcttgaatttaaattcacaaataatacatatataaaagttttactatttttgttgctttattttttcttttacaagtcgtagctcaaccgatgaaaaagcaatcggtgcaccattatcataggcgtgcttactaagcgatttttgttttttaaaaaactttattcatcagcatttcctgaaatactccacactttttactttacggcctcaaataattatcataaacttacttaaagcacacccttgtagtccaagattagtaaccctactccccgaaaaaaaaagagaaagtcaacagcgtgagatgaacaaactcatcgatttttatgaagataggcaaacggccaaacgcattactagactaactagattagttgccaaacaaggttaaataactaattcccttaacccaaacaaaatgtagcattcacattggggtagtctagcatgatcaaatattcaaatcccggtaggtatccggaggctttcactccttaccgattgcagttatgcaaaaactgaaatgatatacatagacaatagtacacttggcctttttcatcatagagaacttacatggcaagtgcacaactcacttttgcatccagaacttccaaggatcatacatgatacatggtgcataacacatgatttacatagtgctaagccgctttacagcactataatcagctcagctgaaacctcttcacacatatctcatcagatggactgatggagcattctgtttctggctatgccatgggtcacttggggcagtagtgccttctctgccagatgacagaaacgagaatgccatcaccagctgaactcaatggaggaaaaagggagcaaccagcaatccagcatcactcaaaatttcctttccatttcccattactaagaacagccttttaactagagaaagatttgcgcgccaaggcgaccgaggtattgggtgaggaaaactacacgcttcagggctaacatatatacacaattaggctattataccgctatagacagatctcacctgtgcaagcctactgtacacggttgcacccttacacattctgcagttgaaggcttgaagcttagctagagatacaatgttgcaaagtgccttcctagtgcttcaccaagctccgaatgactgacgagctgaaattatcggtggagagacttctcagcaccttttagccagtttggccagggaagagacctcacactttctcagcactattcgcccttaatcctgtatttgttgcatgatcctcatttctctgtgaattatagacataaaacaaaaacaaaaggatgcaggccttacatgaatggagcacttaatggtctatcagctagaactgagcttctggtgcttcctagctcaagcccatcagacggggtactgtatgaagatagcaacttcttctataataaatttcataggacacaggttagttccttttttcagaagaacagacatatgctctaattgggtaatggaagcatactgaatgccataattgtgtagccttgtaaatgacatcctatttcaaattgctatgatgcacagcatgtccaacatactaaagaaagctatttttttcagtggtgagtaactcttttgaaaagaaaattcaatatggtatcaaccttttattattattattattattattttggatgccctcatgcttcataatgttatggcttatatacatcatctcaattgtgtgttacaagagaagggctagaacttaagacctgctgtactggagaaaatttgatattggtacataccaaaaatttctgatagtttcaaaagtttgctaaaatttggtgactttgcacacattttctgatagctgcccatacattccagccattctgcacagacagtaccagaaaccatggcaaatgggcaaccctgctagaagcacagaatgtgaacacagacacctaagtccaataaggcatgaacttgcttctaaaatcatgtttagtttatccatatgaaagaaataaattatgatattgataaaatgaaggtgttaaaaatcagaaacgaatactcatcatacatgcatttatgggattttcagaactagttacctccaaaccacagtaaacaataactgttagcgtactacagcacatgcacaatgtggtgctaacattacctttcatatgtttcaagaagtcaacaaaatatcacagagaaaaaggcaagtatggaaaatgcagcagacagaaaatgcttgaattctgttgcatggaacattttctgtaaaacaaacagcagtgaaccatacacaagcatgatccaaattctaaaggcatttttctttcttttgaaggaagtaatggcagtacacagccaaactgaattctagaggcatgctggagagctgcgtacctgatcttcaaaatcaggactagtcaaattgatggagagatttctcattaacaacaatgcctaaaggggagaaaaatggacacacgtcagttgaaatgtcgagtttgaaaattgcatgctaaggaaattatgaattaaatatgccttttgttggtttcaacaaagataacaaaacaatctaaaatgctgactaaaagcatacatattgcttgagtgaagtaccacaaagaacattctttatgcttatgtttcagttgtcttgacttgtcacgtacaattatactttaactgagcagaacaaagcttatccatgattcacataccgtctcaacatcaattggattcatctcctttagtttctgtaaatggccacttgtgcttggatcgaaaacgctgcccaagaagctgtatacttgtgcaaaatctggcataactacattaaaagattaaaagttaacaatgccagtctgaaattttgaatcatgtaaataaagcattggttgaagacagaaacctcaatattgttactgatcaaatctatgaaaaaaaaaatatctgtaaggtgccaggacctgggaatggactgtgctgtcgtgtaacactacttttcagttctaaaacacctcaagcagaatcagtaatttgttggtggtaattgttattctaaacaagtaaccaagtgttataaagattgaaacaaaacaagtgcacagagaggaagatcaaaacagaagccacagaaacaataaaaatgggcaatatgactcaaactgcagaaagataactatataaagaaaaatcttaagaggtactaacggcggagtgacggaacttgatttatctgatcattagtttcaccaggttgccatgccctcgcagggccttcagtactgctagagcaaaaattgttgggggccattgctccagcacctaaatcttctgagtgaaagaagataaggattaaatcttctgagtgaaagaagataaggattaactgatggatattgcatttgaatttttataaggaagaggtaccacggacaacaaacctttcaccatggatgaggctacaattggtgggatagaattgtgtgtccatgacgaaacagtggcattcatgcctgagttcctaagcatggaagatgaatctgcctttatggtatatcctggctctgcaagatgagaatatatattgaagtaaatgttttgtgcagaggggggtactgttagtatcaaagatatatgtgttgggtgcgtgctgaacttatgagcatatgaggatctaccatttttggaggccttttgagggtatggatgagcagctttacgctttggtcgtggaggtgggacatgctcacttgttccattcttttgaaccttcaaaaaatacttctgtgcatggctcctaatctgcaaaatcaagttgagatggtaaacaaaaattatttcactggagagttgatcgtgtgcaatgtctgcaaatattttattgtgagaagtggagaaaagggatttgaacccatggacacaagcaccaacgcactgtgtattacaccacaaaaaaaggcattgtgtattagttgtttattataggtcaacatatatgacatatatcaacaaatcagggattcagttctgctaggtttgtgacgaaatttgatgccacaattccctttattcatttgccagaggatatccccttttccatttataatttgcccacctgaataacagtcttcgatccaacaaaagcttctatctttttccaatcacgatcaaagctgaaaagaagcaaggtattacacatgaatatcagatgtaaaaggacagtcctacaattgaatatcaaaccttttgtacagatacttgaattcaacagcaacaaatgcagtgtttttggtgcgccaaaacacattattggcaatcatatgcaaatagggggaccaatacgttggaagcatttcatagtaattatgattactaaaatgtccaataattcaggtgtgctcaaccaggtcaaagaaatatcaagtattatagcaccaaaagtccaaaactacgaagcagagaactgcaggatactgctgtactaatttgtgagttgtgaatttgtgacttttggctaattacgagagcaaatgctttgaggccttaaaatatccagtgggggtgctatacccggacaaatggcatcactagatgaacacaaagcacctcagtttgtaaatttgtgctattatttcaattcatataatctgcaaattttagtcaaaaaaatataatctgcaaattggatccttagatttcctctttgcccaaaggttgtaccagtactactgattattgtccttgtgcacaacagcagcttatgaaattctgaaacacggcttcatctcagtacagacaagaaatctttaaaagatcccctgactaaaaaactctccatatgctactccaagaccaaatttaaaaacaaatgaacaaacaaacaagttttgttttttttacgtaaaacaagttaagtaagctattttgctactgttttatatcaataatacacaagacagcaaaaaaacatcggaacctaactaacgcatcacaagagctagaaaaacattcaatcttcacctcaaagaccgcacgattgcaaaattccgagcaaaaccacgcatcgagttgggtggcaaaagacggggtgaaattaaggaaaaaggcacggcaattccgcgattttgcttacagctggagggcctcaaggaacttgtcgtgctcctgctccgtccagctctcgcgcgacttggtgatggtgtacggcttccgcaccttcttgctggcgtcctccccagccgagcccgccgctgccgcggccgcgtcgggcggcggctggttggcggagaccatgggagcggagcgtgcgggcgctcggcgtaggcgtcggcgtcggcacggcggctcagagtctctggctctgcaggcgtggcgtgatggtgggtgggagtgtgtgggtggtggcgcagcggcggtgtggccgtgcgtttggtttggttggggaggggaggcggagagattgggaacggggaaggggacggcgtgcgctgggggggcttgtggctgcgcgggcggcagagcgccagccagccactagactagaccaccacttaccactgaccaccgctgtgctgtgcccccgcccacttgcctcccgtcccgtccctctcacgcgcgtcgcgctcgcgatctcggcccgctccttcgcttgctcgctcgctagctttttttttggttactcatttctcaatatgtggctccccgcgcgctcgcggctgttcgtgagacacgaccgggtaaacaaaaatttggggcgaaaattttctaaggcgtttgcgtcgtcctgtttatcggtgagtccgtgaatatcctacagtttcgtatctatcctactacagtcttcctactggtacatcaaaattggcctgaaatttttgagtgggacgttttgttctaaagttagatcatcgtggatgtgcttatcaaggtgctaaacaacgtgttttgtttaaaaaaaacactttcttcatccatatttcttttaattcatttccaacttttatatttatatttagtttatttgtttgcgatattaaataattgttgtgaagtcggaatatctaccgtccattacctgtcctcgctggtcagctttagattataagatattgagttatgatgtttgattttttatcgtagttgtagggattttttttccttgaacaaggtagattatattaaatgggcatgttcggctgttgatttgcagctgcaattggaacgagcctaatactaagcgaggtatgatataaaagggttataaaaaatagaataaagagcctccacatcttaaaatgttacaatatatgcgagcgacgaacgtatccacgacgctgaccaactccagcatatgcagaacaaatgaacaaatatcaaccatcatcttcattcaacataatagcaaaccgatgtcatcaggcaaatcgaaaacctaaatacaaaagccgtcgctgccgatttgactattaacagcttgacaagaagtctagtaaaaaatgtgtaccatctcatgaaaaataaaagaagcctagtaaaatattagtatatcaaacatttggtgtgaaaatatttttcaattcattaaaaaaacaaatcccattgtgcgtctgtcgccgagctcgggcggtcactagggatcgctggcagcaaatccacccctactaacatgaaatgccttttgcaaactatgtgacaatcaaaaacacaaaaaagaaatttattgcacccttcatccccgaatatagcaagttttagtgtttggtgtgggtatcaactatcaaggagagataaaaagattgatcgttttctcgggatgagtaaagtatatataggctaggattatttatggttataataaaaccaagaggtagtaaaggtaatataggtattttagtgataaaaatcacattttactcgtaccagcaccggtggagaaacctttttttactccggttggtaacccctttagttccgagtttctaaccgggagtagaaatctgggactaaatctttagtcccggttggtaataaaaaccggaactacagagagggtagcggcagtccaaatggtccccttttctttttttctctttcttattttctctcgtatcgagtggcatgcatatccctaaatcaaaccccaaatcaccaaatcaaaatagcatcccaaatccacatcacaaaatcaaagtaacatcccaaatccacatcacaaatcttaaagttacttatacatacaaatcaaatacatcacaaatcctaaaaaaattacacacaaatcaaatacatcacagattatacatcttagatccgtacaatgaatcacaaaattatacatctcagtcaaccacaaattatcaaaaaaagaaaagaaaagaaaacaacgcctgcctgacgcctgccgccgccgcctgcggccccaccggccgcccgccgcctgcccgccgccacatgcggccccaccggccgccggccgcctgcccgccgccacatgcctggaggaggggggaggagaggggaggggaggaggaaggggaggagagggaggagatctgtgagaggggaggatcgatcgatctgtgtgagtggttgcgatcgtggaggagaggataagtgatagggattatatactacgcgttgaattttagtcccggttggtaataccaaccgggacgaaagatcatctagatctttagtcccgattagtattactaaccggtgaagcatctaggcccccgttgttaattttggtaattaatgacaaacgctaattgtggactaaccgttgctattgagataatattttaagttaggtccacgtcatgtgtgcgcatggatgactatcgatggattaaaattgacggcgcaaagcaaagagaaagaagacggtaaaagtagtgctttaatttaattgatcgaggtatagggcgatcaaatttgctagtttattttttagttttgccgtactattaagaggggtaatgacctagcaaagagatgattttaattgccacattaggtcattatgcatttagacttgtgctcgcttttcatcacacacacaatcacttgggatttcactggtttcggcctgatcaggggcggtcagaccggccacatagtggcggtttgaccggcgtgccctggccggtctgaccggccgcaagacggcggtctgaccggcgaataaggccggtctgactggcggcacatgcgtggtcagaccgtccccctggaggccgggatggtgctactcggggtggccgatacagagccgacggagccgtattcggtcagaccgaggcgatggcggtctgaccgagccaaggtcggtctgaccgcccactcaacgccggtctaaccggccaggccgatggggccctctgacagcactacaacggctagttttctagccgttgcagagtagcacggtctgaccgaccgcataccttcggttagaccggcagagcacaaagttaggggatttcgcccccaacggctagttttggttggtgggagtataaatactctccctccagcagcaaggggtctctcttgacacccaattcaattgcatacaccccttgcacctctctcacacccacttgagctttgtgttcatccatctagtgtgttagagggttaattagccaagagtcaagtgcattgcttccatttgtagagctagtgtggcacttgattgatcacctttcaagaagtgcattgctctccaagccgaagttgaagataagagcaagggcaaggtgaatgaagtcaatgaggacttggaggaagagattgcccttcttgctagaaggttcaatgatctcttgggaaggagaaaggagagaggaaggggctccaactcaaataggagtagaaatagaagacccaacaagactctctccaacttgaggtgttttgagtgtggtgagaagggacactttgtttccaagtgccctttcaaggatgatgatggagacaagtcatccaagaagaagagtggaggctacaagctcatgaagaagctcaagaaggaatgcaagaagattgaggcattcatcggggaatgggactcaaatgaggagagctccgcctcatccgggtccgaggaagaaggtggtgatgatgcaagctccaagaagaagaagatgaccgttgttgccatcaaggaggctccatcactcttcgctccactttgtctcatggcaaagggttcctctaaggtaacatctcttagtgatagtgagagtgatgatgattgtgatgatgtttcctatgatgagcttgtgagtatgtttgaggagctccatgcttatagtgagaaggagattgtcaagttcaaggctctaaagaaggatcatgcttctttggaggtcttgtatgaggagctaaagacctcttatgagagactcaccatttctcatgagaagcttaaggaagctcatgacaacctcctttccactactcaacatggagctcttattgatgttggcatatcttgtgatttgcttgatgatagtgctacttgccatattgctcatgttgcatcatctagcatttctacctcttgtgatgatcttgtggatatgtctagctctagctcttgtatttccatttgtgatgcctcacttgttgttgagaacaatgagcttaaggagcaagtggccaagctcaacaagagtttggagaggtgcttcaagggtaagaacactcttgacaagattttaagtgagcaacgatgcatccttaacaaggagggacttggattcattccaaagaagggtaagaaaccttctcaccgtgccactcgttttgtcaagagcaatggtaagtattgctccaagtgccgtgaggttgggcatttggtgaatgattgccctggtggtaagcctcctaagacatgcatgtttgattctcattatatgcttaggaaggctcatgatggtagcattgttgctagatatgtgggttcctctatactcggtggttaaaagaatgccatttgggtgcccaaagctttggtctctaacctccaaggacccaaacaagtttgggtacctaaaagagcttgatcttcttttgtaggtgaactaccgcaccggtgggagccattgggtgcttgatagtggatgcactcaacacatgaccggtgatagagctatgttcaccacatttgaagtaggagagaaagaataagagaaagtgacatttggagacaatagcaaaggaaaggtaattgggttagttaaaattgctatctccaatgatttgtcaattgataatgtctctcttgttaaatctctaaatttcaatttgctttcagttgctcaaatttgtgatcttggcttgtcatgtgctttcttcccgcaagaagttattgtttctagccttcttgacaagtcttgtgtgttcaaaggtttttgatatggaaatctttatttggttgatttcaattctagtgaagcaaatttgaaaacttgtttagttgcaaaaacttcattgggttggctttgacataggaggctagcccatgttggcatgaatcaattgagcaaactttcaaaacgtgatctagttgtgggcttgaaagatgtgaagtttgagaaagataaactttgtagtgcttgtcaagccggcaagcaagttgcatgttctcatcctactaagagtatcatgtccatatctagaccattggagctcttgcatatggatttgtttggcccaacaacctataagagcattgttggtaatagtcattgtcttgtgattgttgatgattattctcgctatacttgggtgttctttttgcatgataagtctattgttgccgagcttttcaaaaagtttgcaacaagggcccaaaatgaatttaattgcactcttgtgaaaattagaagtgacgatggttccgagtttaagaataccaatatcgaggactattgtgattatcttggtatcaaacacgaactttccgctacctactcacctcaacaaaatggtgtagtggagaggaaaaatcgtacattgattgagatggcaaggactatgcttgatgaatatggtgtttccgattccttttggacggaagccataaacaccgcttgccatgcaaccaataggctttattttcatcgtctcttgaaaaagacttcctatgagctaattgttgggaggaagccaaatgttgcatattttcgagtttttggttgcaagtgttatatttatcgaaagggtgttagactaaccaaatttaaaagtcggtgtgatgaagggtttcttctaggttatgcctcaaatagcaaggcataccgggtctacaacaagaacaaaggtattgtggaagaaaccgccgatgttcaatttgatgagactaatggctcccaagaggggcacgagaatttggatgatgtaggtgatgaaggcttgatgagagctatgaagaacatgtcaattggagatgtcaagcctattgaagtggaagacaagtcatccacctccactcaagatgagccatctacttccgctacgccaagtctagctcaagttgaagtgaaggaggagaaggcacaagatccacctatgccaccaaggatacacaccgctctttccaaggatcacccaattgaccaagtgttgggtgacattagtaagggtgttcaaactcgatctcgtgtcgcttcgatttgtgaacattactcgtttgtttcttgtcttgagtcaaaacatgtagatgaagctctttgtgatccggattggatgaatgctatgcatgaagagctcaacaactttgcaagaaacaaggtgtggattttggttgaaagacctagagaccacaatatcatagggacaaagtgggtctttaggaacaaacaagatgagaacgggttggtggtgagaaacaaggcaagattggtggcacaaggtttcacacaagttgaaggtttggactttggtgaaacttttgcccccgtggcaagacttgaggctattcgtatccttcttgcatttgcatcatgctttgatataaaactatttcaaatggatgtgaaaagtgcttttctaaatgatgaaattgccgaacttgtctttgttgaacaacctcccggttttgaagatcctaaaaatcctaaccatgtttataaactctcaaaagctctttatggtttaaaacaagctcctagggcttggtatgaaagattgagagattttcttttgtcaaaggatttcaaaattggaaaagttgacaccatccttttcacaaaaatcattggtgatgatttctttgtgtgtcaaaattatgttgatgacatcatattcggttctactaatgaggtaatttgcaaggaatttggtgatatgatgtctagggaatttgagatgtccatgattggagagttgagcttcttccttggacttcaaatcaagcaactcaaagatgggacgttcatgagccaaaccaagtacatcaaggatctactcaagaggtttggcttggaggatgcgaagcccatcaagacacctatggcaaccaacggacatctcgaccttgatgagggaggtaaaccggtagatttaaagctttatcgttctatgattggtagcttgctttaccttaccgcatctaggccggatatcatgtttagtgcttgcatgtgtgcacggtttcaagccgctcctaaggagtgtcacttagtggtcgtgaaaaggattctaagatatttaaagcattcatctactattggcttgtggtacccaaaaggtgctaagtttaagcttgttggctattccgattcggattatgccggttgcaaagtggatagaaagagcacaaaatgcttggtagctcccttgtgtcatggtcatccaagaaacaaaactccgtagccctctctaccgccgaggcggaatatgtttcggcgggtagttgttgtgcccaattgctttggatgaaacaaacattattggactatggtatatccttcaccaaaaccccactcctatgtgacaatgatagtgccataaagatagccaataacccggtccaacattctagaaccaagcatattgatatacgccatcacttcctaagagaccatgttgccaagtgtgacatagtcattagccacattagaaccgaggatcaactagccgacatctttaccaagcctcttgatgaaacccgcttttgcaaattgaggaatgagttaaatgtcatagatttctctaatgtggcttgagatggtgcaccatggtttcttctttttgcattatgtatatttgctctcatttgctcttatgctttggatttattgccatttggttcttcattgcgaaaatggagcatgtcacattaagggggagttttgcactcttacatgtgctctacttccttttatatgtgagcaaaccaactagtggtgttaatagtattttcaaaatgcccaagtcaacctaagtcaaaacttttgcaaaatcaatgtaatttgaaaactatctgttggaaaatgtttcaaaaggtttcctatatgttttccaagcctcacattgcaagaaaaatgatttttgaataaaaatgccattttggtcctattttaaagaaactagattcttagttttggccaaaatgagatttatccccaaaatgagattgagaaggaatttgagaaaagtttcaaaacaaagttggtagagaagaagatttgatatgtttttggttttcaaacctatttcaaaaacctaatcattcaaaagttatttgaaaatcaaattcgcccaaaaacccctataaaccataaaaggtcacctcctagcactcaagtgagttttgttgcaaatcttcataattttcaaatgttatgaatggttggcaatatttcaactcacacattttaaaattgctccaaaaatcaattttttgttgaattttattgtgtgggggttgccggcttgtgcaagggctgtgcacagccgacaggggcctggcggtctgaccggcgctatatgcgcggtctgaccagccgaggtgggcccaggcagttttgccccttttcttctccatcccgcacctaccctctcccatctcatccccattcatccccaactcgaaaaactctctctctctcaccttccctcaaaccctaactctttcctccaccaaatcccctcggtttgaccgcggatttctctccggttacaccgtaagtgattctcctccgcttcctctctctattccatggattagttcgtgtttttgttgagtttttgatccatggcatggaaccctaggtgaagcacgaggtgttcttcgatttgcactagtagagggtagtttcttggtgtgattcatccccttcaaccggtaaatcactctctctcttgtgcattctctcaaatcaatctatttcaccctagggctatgggtagttattccaatcttgatgaactaggccataccctttgttgttctagttccaatcttgagctatattgttctagcgatttttagactcaaatgtgaagatgtgaaaatttttggatgcttgaacttgtgggaggaggtctgcccagagccataggcggtctgaccgtgggtcagccgccggtctgaccggcgtgtgcgcctggtctgaccggccggcagccgtcagtctgactggccaccagcgggcggtctgaccggcctgatgccgtcggtttgaccgccctactagctgtggtctgaccacccttccacaggatataggcaaattttcacctctccaaattgtttctagaattattgctaatatctatcatcctttgctctttgacagtgatgcctccccgcactcgccatggtcttcgtgcacccactccggatcccgtgagtgagcctgaggaatcgagcggagatgagtacgctcaaagtgatgaagaggttaaggccaatgttgaaagggctagtgaggaggctagtggagatgatgactgtggaagtggagaggatgaggatgaaggaagtgatgatatgcacattgatccctccatccaatttgttgtgaacatgaggaatccatcgcagtataccatcttgaggcaccatgatcagtttttgaggcctcgggacaccccggatccccgttttcacaccgcttcccagaagagtgtgtatgagcaggtttatgcagggaaagcttttgcagagcataagtggatttcttggagagacatcaatgagactccagagtttgagggcttgcaggatctcttcaagactgttggcattgaccggattgtgactctcaaacaagactacaatgaagatttgatccggcagttctatgctacagtgtgggtggctggagactatagtgagatgaagtggatgtccgacacccttcagtgttctatctccaggaggcaattccggcggctcctcaatattcgcttggactttgaagatgacttgcatgaggagcacacccataatccgctctccatagactatctctctcatttttatgaagatggagtgcggtacacacatgggaaggttgccggcctaaggactatccccagtgtggttaacaggattgtgagagctaccatcctccctcgccttggtaataatgatgatattagggggtagcttggcacgtcatcgatgccatcattcgtggccgttagttcgacattgtgtctctcatgatgcaagagatttccatctccaaggagacctttactcagggaatctattatgccccttacatcatgaggttgattcaagacaagcttggggctgttgggcaaaatttgaagaagcacaagcagtacaagccccgccttcagcttggagctccccgtgctcctagggcggcgccctcctctcgtcctggagctagctcaagctcagcacctcctcctcctcctcttgggtatgatccaaatgctttcttccatccacagtatgcttattttggaatgcaacccaacgaatacttcaacccggtacttggggctattaataccctaagtgaaagcattcaacgcttgtctaccgggcatgaagctttacatgaggatgttcgtggcttgcgcacggacgttggagacttgaatgcttccgtggggagattgcacactagagtgggtacattggattctcgagtccaactgttggagagctcccaagcatttgtgtatcatcgttgtcgtgatgctcctcatccttccacttcggcgtgtcctccttctcctccacaagagtaaagacctttttggtgcttgatgccaaaagggggagaaaagagtgctttatgttttgtgggttgggactagtagtagtgaggatagtgccctcatttctaataggctaaggtgttttgagctatattttgtatgggtatgggctattactctatattgtgtgttctttgtcgttttgttaaactctatgtcatttggacccttcgtggtcttgtaatagcctatgtttatttgtgagcccttttaggatgatttgtgacttttgtgatttgattggttaagtgatgtgaacttgtgcgatgatggatggtgtatgcgatattgatatatatatatatatatatatatgaccatcttatgctcatgaatgaatatttgttgaagttcacattgaaatattgcttatgtgtttgtgcttattggaatgtgaaattgaaatgtgcattggctccatatttgttgtctatgattgatatgcacaggtttagggggagcttttgatttccattgcaatatatgtccatgtgatctatgtttgattatatatatatttgtggtgtttgtcatcaattaccaaaaagggggagattgaagcatctagtcccccgttgttaattttggtaattaatgacaaacgctaattgtggactaaccgttgctattgagataatattttaagttaggtgtcatgtgtgcgcatggatgactatcgatggattaaaattgacggcgcaaagcaaagagaaagaagacggtaaaactagtgctttaatttaattgatcgaggtgtagggcgatcaaatttgctagtttattttttagtttcgccgtactattaagaggggtaatgacctagcaaagagatgattttaattgccacattaggtcattatgcatttagacttgtgctcgcttttcatcacacacaatcacttgggatttcactggtttcggcctgaccaggggcggtcagaccggccacatagtggcggtctgaccggcgtgccctggccggtctgatcggctgcaagatggcggtctgaccggcgaataaggcaggtctgaccggcggcacatgcgcggtcagaccgtccccctggaggccgggatggtgctgctcggggtggccgatacagagccgacggagccgtattcggtcagactgaggcgatggtggtctgaccgagccgaggtcggtctgaccgcccactcaacgccggtctgaccggccaggccgatggggccctctgacaacactacaacagctagttttctagccgttgtagagtagcacggtctgaccggccgcatacctccggtcagaccggcagagcacaaagttaggggatttcgcccccaacggctagttttggttggtgggagtataaatactccccctccagcagcaaggggtctctcttggcacccaattcaattgcatacaccccttgcacctctctcacacctacttgagctttgtgttcatccatctagtgtgttagagagttaattagccaagagtcaagtgcattgtttccatttgtagagctagtatggcacttgattgatcatctccacgccgggtcattgcttgttactcttggaggttgccgcctcctagacggcatgtggaggagttgcccggtgacctctccgagaagattgtggaggaggcccggcgccggtttgtgagtggtttggagttcaccaccttcggagtgaaggaagaactaccctagtgatagaggcttgggtagtcctctccgtgggccggctcccgccttgcctaccccttgacgaagggggcgtgcggtggcttcgtggttgagcggtggagttgggctagcctcaacggggagtaggaaaccggcgagtttccgaacctcggtgaaaaatctcttgtctccttgtctcatttgattgtcgcatttacatttgtgcaatttacatttctagagacatacttgagatcatatcaccctaggattgctaaacattgacataggagtgtgatttactttcctagagatataattgagccactatcactctaggtttgcaaaacataacttagttgcttagttagaattcaccctcaccaagcctagcaacttaggttagttttgattaggtgtcatttagttttaaatcgcctattcacccccctctagtcgacatctcaatcctacaaccgggactaaagtggtgatctttaggactaaagtggtgatctttaggacctcggccccctgacatgtctctgacagcgaatgaaccgggactaaagatcatagaatggctatggggtttttaaccgaggctaaagatcatagaatgtctatgtggttttgggtcgatccagtaaagatcatttctctagtagtgcagcttgctatatttgatataaaatttaaacttatgagttgttatattttggtatggataaagtataaaaaaacatgttggagaaatataacatgcctacttaagcctcctttggattgaggctttttaaggaaaaattcaggattcaaattccgatttgagaatggtatatgccttaggaaaacaacgaagaaaaaacggagggaacaaaaatcctgcacctattatttcatagaaaaagtgcatgcaaaaataaatccatctagatcgacctatttttcctcttgccattgcataagatcaacacagggtaacaactgtgtgattgtcgtgggcttgtggccaattgccaacagcgtggaaaatttagttatgacttattgtgcgattttttttattcctatgtttcaaagaagcaatccaacaaaattcatatgttttataattatttgttttacacgtacaatcatattcagtactatgtttcttatattcttaccttcttactatcatgtttcaaatggagcctttaatttagtgtttcgcatacaagctgtgatgaaagtagaaagatatttaagtcccgataaaacttttactatatcaagtttttgttatagaaattccatggccaatcctttcaaccgctgaaaatttaattgaatgtttagcgacgagcccaaacagcagccaatggtagccaggcgatggctacgttgttgtatacaaggttttagaccaagcaacctagctaagagcaggtacaatagcagactattagtcagttacaagtatattttaatgagataaaagataagagagaatagcagcaggctatagatctgcagccagctgcagtacggactccaagacgcaatgtatgtatgataggtgggaccatatactaatagaatagtagacaactattgtatgaattagctattagattggctatagatgaattaaaactagtagtggactatgctattaaacttgctcaaacacagtcagagatgaacagggttatattactttatcctcgccgtagcctcggctatcttctcttcgacttccataacttaccgatgatgctggatcaatcatcgaaaccctgtattagttatcattacctagtttgtgcttgtgcttccctagccaccaccaccatctatggtgatctgtgcttaaattctttccactgcagaactgcaccactgtatccccacacctttgcgtgagccaaagctataagttttatgctgtactacgacctggtttagggcaagtactataggcatccaagcacaatctcctaggtgtcacataagctaaaatagtgaggcggaggagagaagagatgagagagataagcagccacctctcatgcaagaggtaaccactacacaaaattcaagacaaaaggagagagaggaagagtagattgggcaaacaaacattggggctagtgtattagaattagtatagatttgatatattgtacatgttacctctacatttattagttgatgatgtggtcaagattagatgcaacattcacctcttttataaaacttgcccttagtacccaactttttcttcaaacttccaactttttcatcacatcgaaactttcctacacacaaactttcaaattttccgttacatcattccaatatcaatcaaaattctaattttagtgtgaactaaacacacccgcaacgtttgaagattggaaatctggaatgatgcttagcttggagttttctcggagctatcgtttcgcttcttcgcggaataagtgaaaggttatatttacaaacgaaaagtaatctatgaataaaatttttatataggtgttcctagtgatctaaaagtaaatgctgaaaaacaaattttaatgagaaaaccacaaaatcaggtccaaatctaagattaaaaatttaaattttgactgctaagcataaataaaagcgaaaagatgttacacgaacctattcagaaaaactacctaacggcatcccgtggagacgggatagtagtactgccttatctcctcttcccctctctctgtgtctcttcctctccactcgctctctctctgtctcttcccctccactcgatctctctctctgtgactaccacccatgagcatggaggcggcgatgacgatgacgacgacgacgacggtgccgtcaccaccagcccccgcggacgacctggatgacagccggcagggctcccgaccaccacgggcgacggccaccgtcgagaagcctccccatcaagctcctcaagccgctcctcctcttcgttgttcttgtcgctggcttcctcgccgctgccaccctcctcctcatcggcggcgctggcgcctcctacggttggggagcggtggacgcggccaccgggggtgagcgcttggcacaacatgagtgatgaggagctgctctaggcggcgttgatggagccacaggttcggcggtttggagcgaggcacgatgacgagcgacggaatggcacaaggtaggcactagatctatcgcctcctcttcctcttcctttgccgccgccccgctgctcgacctccccgacccgcgactcctcctcctcctcctctctcttgggatatcacactgatacctaggtatcagctcgatacccagggtaccaggtatcagtcgatacccaggtaccaaggcctgatacccagataccaatgcttgacacctaggtatcagctcgatacccaggtaccaatgcttgacacctaggtatcagctcgatacccaaggtaccaggtatcagtcgataccagggtacgaggtactaggtaccaactgatacgcaaggtaccaagtatcaggatggagaggaggtagaggttctagagcatgttgccgccggcgttgtggtgaccgagacaccgagaccgctggcttcttctgcttctgtggcagcggaggaggagccacctgcgctcaccggcaatgaggcgacgggagcagcgggcaaggacgacaacgaccttggcgaggagcgcgagggaggaggggagaggccccggcgccggcagcgacgggaacgctagtggaagaagcagcgccacagcgcgcggaggcggcaccgcagcgggcgaaggacgacgtcgtggatcgtgccgtcgttgtccacggccgccggagacgacgacgacgaccccgccagcttcatctccgcctctcgttattttctcctgtgagagagagagagagagtttgtggaggagaagggaaggagataaggtagtggagatcttatcccgtagcaacgggatcccattgtatagctgtcctcgaacctattccaccgccacgcgagcaagggatgccattttctttttggcccccgcttgcagcgtcacatgcagccacgcgtatgctttttctcttcaattttcccgcaggagaacgagagaaaacgcaccgttggccgcgtatcagggattcggggcatcaaggtccaatagctgaatagcacatcgccatcacaatgccagcgcctctcccaggtgtcggaaccggagagagggagagatagagagacctggaaggctggaaatcgagagcagcgaggcggcgaaacaagcaggcggcccggctctcagtctcatcccgtgcctcctccgcctccctaatcgtaagcgcacgctccactccgattaccttgtgttggtatttttgtactttcgctgtagctgctgttttttgggtccgaatcgagctgaggggattaggcgcctaaattacttctgctagtttcggattttggatgttctagtgcaaaacggacggttggatcggctgcttgttttgtgcggttcgacggaactgtggatgtcgttgtcgatcgagcgatcgatctatcgcgcgtgtggctagaaccgtgcgttcagctgttgtggcattctgtcgaacaccttatgatcaaccatgggcaggtgcggcttatagcaatttcagtgtgctaactggaattagcagcggcctgtaggctaaaacggttgtttgtctggaaatccataccctccccacatcctccccttacatgcagtgattgttgctgatctgatggagtgtactatcttctttcgggatgctgaaagaccatggaaagctaatttaaaacatccccttgttatgcagtcaattttcagatcatgttttggaaagccgttaaattttcgtgcacactgcacagatttgtccgtcaatagttttcacttttgcagtttgtcatgcatgttgacgcggtcatccttgttagcctactataattagattggtgcatgtcgcgtcagttactttttagttaacccgctgtttaaaacagtgtgatggctgcacccacatgcaaatgttggctgatatccaatttttaggaccagacatgccaaatttgccaaaacatgttgaaaattgtggtcagtatgtcagttatgatctatcataatttttcgtgccatttttgcttaaacaacctcattcacttgctttagcagtattctttattaaaaattatcagtcattcgtgtgtcagatttttatctaatagtatctttcccctatgaaagtgcttggattctcaactggtttttgttgttacaattgaattgcaataaccatatcactgtcaatgctctgatgtaagaataatgtaagagaaaaaaaagaggaggaaaatatggatgcagacaatctgtgcagctgtgcttctaggagagtgtcatttaccttcaagtttttagaatttgctcatcttcatctttcattaaaatacatgattttttttgtgttcttccgtagccatgaatgcatgctcactctatagttttcttaatttattcttgcaggtcaaccatctagatgtctcagtcggtgcaagggtctttttgttagttactttgcaaagttaaacttgaaaatttaaaggataaaaaaatgtccaggactgcaataattttgcatcgatttcgtcaagcagctgccagtcagagcctcgtagagacttctcttcagtcatgcccatattttggtgttcctctgagatggttaagctgcacagagcaaacttcaaaatgggaaacttctacatcttatcagattgatgacgtagatcaatattcaccaattagtagtgtagcaaaaatctgcacacatcccctttcatctcacgtaaaccactgttatcaccacagtcgttcactgggtttctcaagtgtctcaagttctcgtcgcatgtattcctctgatgctagagccaagccagaagattacaaaaatgctatggccaaagtttcttctacagaaacttctgaagtcggcgccacagatcacagtggcaacacttggattgatattttagatagtgcccgtcactctaccatagatgctactgcagccgcacttaagaaactgaaggcgatgactgatccaattgtaccttgcatccaggagttatatgctacctatccagatctacagaggatggtcatcccacttggtgggacactgatgggtacagcagttgcatggtttgtgatgcctattgttctaaggaagctccacaagtacacttcagaaaatcctctcataacgcttgaaggggagtcaactaagaaatacatgtcctatcaaacaagcttgtggagtgcattggaagatcctgcaaaatgtattatcacttttatggcattttcacagatgtaggtccaatttcacacttcaaggagaaatttattcgtttgatgcatagtattgttatagtacaggtgctagaaatgacatctaaattcacctaatcttattctaagggaaattccgaaattcctctagtgtatcttatattttttaacaaagatgctatatgatgcatttcacacttgttttgtcctctaaagcatttgtctgcagcattatgtgcaagaaatttgttggcaaatatatgttcttcacttttccttacagattggtagcatgatgttattttcttcttttgtacaatatgatacaaattatagatactttcttagttagatataaatatgtaagtgaaatgatttttagtgctgtaattcgttctgtatgtatggaatgcatctaattctttctccttcttcagggctgcaattgttgtgccaagtatttcagtttatcttccacaggcatggagaggaacatttgttgtatctcttctgtggtttcttcagaagtggaaaactaacttcattgctaatattatgaccaatcaatctgctatagggatggacagagacagattgttaacatttgataaggtgtcatcgttagcactaattgcacttggaggaatggctcttgctgaagcttgcggtgtacctgtgcagtcaatattgactgttggtggtgtcggaggtatgctcaagttttcaggaaatagtacacataagaggctgtttgtttcaactcatacttatttcttttcatgacaaattcctcttcaatctgtattatggtaactttcctgccgataactaaaatctggataaaatgtgaactaacagcttttcctttatgcttctctaggtgttgctactgcttttgctgctagagatgtcttaggtaacatactgagtgggctctctctacaattttcaaagccattcttggttggggataacataaaggtgcatgctcattttttggaaccatgaatttatttttacataaaatctgtatgagctaccaagtttaaagtcttgattcttcaaatactctggatgagacgttctcttgtcttaatagctaatatggtggaaagttcagatatatgttttttattatctagccaagtcacggtctgttaggaagataatcattttacgacaacaaaggagataaaaaacgttggagatttaaataaaaaataactcaactacttgataaagtttgaaataacccatcctatctcaagcatgtttcgattaaatgcatcctaagtctagaatagtgcattatgatttttgttctttcagaaaaaaaaaggtgcaattgattcaactcttagaaaaaggactaagtattgaaaccatccaaaattgacttgtgaacgctatatcctggcctcctgtgtaacatcagattcttattggacttttttcgaagagtgagaacgtcaaactatcagtggaaggagtaaatgtaggcttagaaaaacaaaaacgttcactaaaattatcaaccattcaatattccataatcctgatcagcaagcatgccttgaggtgtctctttagctttgatactcctatatcgaaattcagagcaataatacctgagtaatttgaagttctttccttctgcaggctgggtcaatagaaggaaaagttattgaaattggactgacatccacgttattgattaacccagaaaacctccctgttgtagttcctaactcactgttctccagccaagtaattccacctttgtggtgattctgttttacttttgtttcctgaaagacaatgctccttggacatgatttccatttcatagaccattgttttgacactgcttcatgttgaccctccatatgatttcgtctgatgatacagattatagtcaataaatcaagagctgtgtggcgtgctagggtggtaaaaattcctgttataattgaagaccttgaaaagattcctactatatcagaggagataaaagtgaagttaaggtccaacccaaacattgatgctccttactgctatctctcacggttagaaagttcacatggagagcttaccattggttgcaacatcaaaagcatggtatgttaattatactcttatcatagttctgacaagtttggaatattagtgattgcaacatcaaatgcatggtatgttaattatactcttatcatagtttgacaagtttggaatattagtgatttttacctctcttgcacttcgatgtgaaataaatcagggcttcacaagcacttgctatggtaaactggtaccgactggtatgtcctagtggtatagtctgcactgatgtgtatgcatgtttcgtacacaactgcatattgacacgagctctacagagaaccatggtttcgagcgaagtaatagaccgtccaaaacaacacacattattcactatagtaggaacataatgtcataggctccagcgatgtcttgcactcacactgcaagaagtctaggagctcccacagcacagttgttgactgcttcgtaagagtaggacaatttgtgtattttgttagattttgtcaaatcttgggattacatcatgcagttttatgttagttgtttacagataaatgcatttagagcattcaaaatgcagaatgactatgttattatacgcacctcagcctttcatccggaatggaggagagatggcgatgagataagagagaatatatagtgaaagtctctacacatccaccaatggagatcacaaaatgtgacttgacacatattcgaggaagaggcagaaaaagctagaaacagtgcgttgtattgtaaaagttgtttctacaactctttcaggttattatggcaaaagcgctttttacgttgtgaaatgctcttaggaagcaaattaacaaaatgactgctctttttagtggggcttaataactcaacctgaacttgatgatgtgtttataaagagctgttcttagagagttagaaaattcatttgtattctattttcttgattactctaacaatatttttatgatacttttgtagagaagagacgaatggacaacagtggaacaagatattcttttgaaagctgccagcattgtcaagcaatacgaatcttgaacttgcgagcacattacagttctgttctatccctctccattttactgcgagaagaggttaaagtggttactctttttctagtttggtatgggtatatgggactgtaaatagagttctcatgtcccatactctaatgttttgatcacatgtgccatatgcctttcctatttaaggaagtgaccctttgtcatcctactgttacatggatacaagaaaaggagatgaaagatgaatcacctatgcacttctgtgttctgtccgcctaatggattatacttggctgaattcccaatccttgcatacacccacgtctatggtcatcgtcttgtttccttcctgtcctttgggagacgacagcaccctgcagcaatttcgcattggagactgcagattcatgtaaaactgacagttaatatactttgtacactgctgtgattaaaaattgctcaatcctctgttcataaatcatcaatgtgagatcggtgaggattacccggtcccataagccggggtcaggtttcttgagcacgaccacggtgtcgagcagcgcgtccgggtcggcgatcttccaccggcacggcgggcgcatgtcattgcggtggcgccaccgctggtacgtcgtcacggtggtctccccgtcgcgcgccaccgtgcggcgcgccgacgagaggtagtagaacgacggtttctcgcaggggcggcgcgccaggggcctcgtgttgaaggcgtgcgccttgtagtccgcgcgcttgtaccagttcaaaaatgtccgcgccggcagctccatctcccgcgccgagatcatgcccctcgacgccatcaccacgaacccccacgacacggacaccgtccaccggttgcgcgcgtcgtagcatatcgactgctgcacggcccccgccgagtccagcgccaccggcccttcgaacagcctccgcaaagccgccggccgcgaccgcgcgttggggaagagcggccgcaccacgtcgaggtggtgcagcgacacgagcggcgccaccgggtgggcggcgaggaggccgaggaggtcgccgtacacgtcgtactggtggaaccccgggtgcctcgtgagcggcacgcccagctccgccatgcacgcgtggatccggtcgtcgctcccgtacagcgacgggtaccggtggatgcaggcgtcctgcatccgctccagcctcgccgccagcggctggctgatggcgaacccgccgccgccgaacgccatcccgtacgagaagaagatgttctgcaggtggctctcggaagggtagccaatgtagtacggctgccggtgatccagcttctggaggaccgcgacgaggttgtctggcaggaagacggtgtcgtcgtcgcccatgacgtaccagcgcacgccggagaggccgaggcggaacgtctcggagacaatgcgggagatgcggatggcggagcggtggccgcggcggttcttgtaagggaagccggaggtgttcgacgagatcttgattggtggcagcccgtctggcacgccggactcccgcaccggctgatccatccacacgaacccgcgcattccggcgttagggcgccaccagatcttgatataatccttccgcttctcccacagccgagcggacgccgcgatgccgaacaccacgtgctgcagagtcgtcgccgccatcgacaccggggcgggtggcggcgtagacaaggaggacgacgacggcgtgtggttgcgggtggtggagagttgggacagagaaacggaggaggtgacgatggggcgatcaagtgggcaggacggcgtggaggagagaatggcgtggagggtgtacaggatgtagaggacggtgaacggaacaatcaagatgatgaggtagcggaggagggtggccgcgagggtctccttgccgccgccgccggtggcggcggcggccttcattgcgcgcgccgtctctgaccgtctttacggtttcacctcctcgttgccgttgccgtcgccgtcggcggcgaaaagcgagagctctcctggcgagaggaacggattggattcgctggaagcgatagattttcacggggaatggatcggattgggatggcgtggcgtgagagctcgtcgggtcgcgcattctgctcgcgcgccgcgcgtggcgcgtttgatgggagcggtttggctcctcctcggctccgtttgtttgtttcaagagatctccccctcttcggtttcgattcgcagccttcgctccgtggacctcactggttatggtttcgtgggcttcaattcgtggttcatgggctttcagaaacagtaactgggcagcagatgggctcatggcccaaaccagtagaagagacttggactttgagcccagcagaaaagagaaatagtcgctctgattccgctctaaggctgaacctgcggtctctttctccggacggacaaacgcccaatcttgacaggcacaggggcgagagagtgctcgggttgtcactgttacagctaaaaaagcatgtgattccttcccttgtcgtcagggcgaggcacatggatcatgagatgcacaatatctgtctgcgggtggcatctgtgtcgagtgaccaactgaccatgcatggtcaagttcgggagtcctgctgctagagtgtctctacatgccagcacgcatctatatatatgatatgaagtatgtccctcttgttgtttcaagaaggctgaagtgatgcagatagtaggattttattgtttatgaagttccttaaaaagaaaaaaagggttagatctctgctattcaatctactacagtttgtagtgggtcacttgatgtcctttgaactgtagtcgtaccacttgagctatcggaagagattctgtagagatcgtccttagatttcttccctcgtagacaaactcgggaaggatattggtccctttctacggggtgaacccgcgacagcgagacgggaatcgggcgtagtccacccgattcacggcacgtcgaaagcgtgttgggcctcagttcgcttgttaattgctggcttgctgcttctcaggttgaggaatccaccacattttgccacacgcgatgggttcgtcgctctaactgtgacggaatgacacgcgatagtacatagctgctctgccgatttcggtgtagtgtaaagatgcgaaggcacgaggcggcttctggacttcacttgtcacttgagatttcttcttgtttattatactcgtataatagctgtgttgcgtgcaggctggcagccgcgaaacctacgatggccgccgcgtgagcttacgaatgttcgacgcagctgcacggggacggaattagattagtgcccgggcgtggctgctgctgccgctgcctgcctggagccggtagtctgtcgctgtcgagagcaacgcgttgaccggatttagccgcatatttaatggatgtgctctctatctacccgtccgtcctgttagccgcgcgatgacgtgagtgaaaccggtcaacacaggccgtcggtcggttagatcacgcgagatcttcgtgctcagatgaggtaaaactcggtgaccgttcagaatcggtgagccaaaggagacgggtaagatttgaatagcgtggggagattggattaaacggcttgccaaattagcaagcaccaaactgtggcactgctctgcttcaacaaatttaatatactactagtaatctgcaaaaaaaaaaggattcacaacttcgcaggcttggaaggtggaatcgacctatatagcagcaaactattcctacttgtgtttttttggggggagttctccttggcgcctatgtacaaatcaggacgcctatgtgcccgtgtgccgtagttgaggcagctctgtcatgccggttgcaacgaaattgaccggggcggtggattggcgggctcactggaaaccgcccaagccgttgagcagcagctcgtgtggtcgcagcagcgtcggggtgggcgccagcggcagcggggatgggtagtacgagaggtcgtagtcggaggggtcaggcaggccggaggcggcgggcaagagctcgtcggggatgagcggcgcgcggcagagcgggcaggtgcgctgctcgtgggccatccagcggtcgaggcagccgcggtggaaaacgtggcggcagttggacagccgccgcacctcgtcgcgcccgcagatgccgctgaggcagaccgcgcagtcgccgccaccgcacaccgccgccggggcggacgccaccagctcgtcgaaccgcaccacggggagggcctcctcgatggccatcggcggaatcgccctgaactcgggccggcggtgctggagcgccgacgacgacgcccaaccctccgccatcccgccgccgcgcccctgcagcatcaggtcctgctccgtggccgccaggccgggcgggttgtcgatgaggtcgccgaggccgactgcgtggaaggcccagaggagaaagcgatggaggtggccgaggaggaggagcacctggagcagcagcctcgggaggagcagctccgagtagcccaccgggaagcccatggcgatcttggatacagccgaattgtgagctgagctgaggtgagcttgcgtctgtgcggtgcgtgcgtggtggggaggggagtgagtgaggaggcggcgttatataaaagcggggaggaggtgagggaagcagaggagaggagagaggggggcggagaattaacgcggaaagatcgtcgaggctggggggagtcgctggttggttggttaccttgttggtttgtgcgtgcgcgtgggtgtgcgtgttgcggtgcgggtcgtgggcttggcttgggtggactggactggctaggcgcgcggtcagtagcagagtggagtagcagcaaggcgtagcagcgtgatctgctttagccgtagcaacatgcctactcctacttgtgtaggtaggccctccccgtccctcttgcgtaagtaggccctcaccgtccctgcaggctggctgcaaacaccgctcccagtttacttcggccgcctttagttttaaagtttttcttcaaactttcaacttttctatcgtatcaaaactttcctacacgcaaactttcaacttttctatcacatcgttctaatttcaaccaaacttccaatttttgcgtgaactaaacacagacaaaccgatgaaaaatttgttgccgaggactcgtgcaagttcgcggtaaacctggtaagattcttacatctagcataacgtccatactgcacgttacatgtgacaggatgaaattgagtaggctcagttttttttgacagcagcagtgcgccctacctcctaagaagctcaagggcgtccacgtaggaaaatgcaaacagggcttctatatacacagtgcgtggagcttaatgtgggctcaccaaaaaaaactttttacccatatctgttccaccacgaaagcatttgttgctttctccgccgctccttcgctccttccccctctctctctcgctcacacggcgacctccgacaggcggcacagatccagcgccgcttggaagaagaagcgggcgcttctccccttcctcccccccccaaaggatctgctggtggcgaatgggtcggcggctagtggcggcacggatcgggtcacgacggaacaacgacgacaacaaggtcaggcgccagatccgctgcctcctcttcttccgctaccgccatcttcccttctttcctcaggatggtggcctcaccggcgaccgccgctgcatgggatgtgggggcgtcgcacgaggccatgcctctccgaacgtgtcgtccgacccattcctcgccccaccctgacaaaccaagacataaaacgggtggttcactttggctacgcggtcctcaggttggtagcggcagatgtgtatctggagtggaatctccgatgtggcagcccggggccgaacgccaactaagcacattgtgaatgcccttatggaactttcttcggtatttatttatttatttatttttctctattacttgatattattttttagcgatgcgagacagagtaataccagcctttgttaaaaattgaataaatttcgctttaaaataaaaaatagttcaacggggcaaatttgaacagagtgaggtaagtgagcttttttttaatagtggatccaattttcaattaagtttgtaagtcaagaatataatatataaacaaaactaaaacttatacaagcatacaatattctaaaacttattcatatgcaaatgtacaatatttttctaaaatctacaatcttacgagaccatgtctggttgacaaataatcactaccggagaaaccatctttcatcggtcgtccaaaaaccacaatagtccgggactaaagattatttttattccgagttaaattttttttttgaagatcaattttagtcccagttaaaagaagttatcaggtctactcaggccctaattaacttagtcccggctagtataaacaaccagaactaaaaatatatctttagtcccagttgtttatcccaagcgggaccaaaaatcctcccgagcaacgcgcgcgccaagtcctctcttggggactcaactggtcttatcaatccccttccccttcctctatctttaatatcagccttatcccttcctctcatcttgatgcaacatcggccgggcacttcccctctcctctccccttcctccccctccccgccaagtcctctcctctcttgctctttgggtcagcggcggcggccgagcgggagcggcggtggccgggcgggcgcggtggcaggggaggcgcgcgcggcggcctcgcgctcccctccgccagatccggtggcggcggtggagcggaggggatggcggtggcagcgacggccgtcagctggcagtgccctctcctgcgggtgcgcgcatgcatggaggccggccgggcatcccctctgctggagatttgtcatttctttctcttttttttggagaatttatgtttcattgtatggattgagatgaagaatttgtgattcattggatgaattgagatgcataattcttttttgagaatatgtgattcattgcatggatctgagatgtataatctatgatgtatttgatttgtgatatttgagatgttactttgattttgggtttgatttgggaatatacgtcccactcgatttgggagaaaatcacttagggattaagtagtaagtagcaaaaaaaatgaaaaaaaaagagaaaaggaaactaaccgggactgacgctgccctctttagttgggactaaagatccaactttagttccggttatttcactcggattcatagccccggttgaaaggttctcaaccaggactacaaaaggtttctccagtagtgaattttgccacacattcttccgccagatgactatccatagcatttccatactttcgtggcaacaaaattagccaccaaccttaggcaaagttggacacgaagttaagggtgagttcggatcaactgtttggataaatttttcggtgacacgtaaaacaaggtaaaccgttagcgcataattaattaagtattaactaaaatttagaaatggatctatatggtttttttaaaagaaacttctttatagaataatgtttttttagaacccaccgtttagtagtttgagaaacatactaatggaaaacgataaatcaccctttggagttataaaataactccgctagtctatcacaaatggaccaggaatctaagaagttatatggactgaccaacaaccctaagattaggagtggcacttagtttgaaaaccacaaataaccttatagttaaaatatacgaagttggtttattagaagtaaactaatcatagtccatctttctactacggagggtgtatttggttgagaatcacactttgccataactaagatcggacaagtttttggtagctataaaaatattgtggataaatatattgctaaaccacaaagtgtggataaagttgatgagaaaattaagtctataatgtgtgaagcatgctattaaaaaaatatacaagctataactatggcagtgaaccaaatatatacctaataaaccgtgatagtaaaaagtgtgatgttacaaagtatgcctataaatcaaatacttccgtagttttaatggtatacaggtagagggagctaagaagggggccgatgcgagctaaagtggagaaactttgaccttgtgactttgtggggggattggggctgcaaagccaccctaagctcactcatcaaaccagttttcagtaccactacgtattgagcttgatgtgtttctttcatcaaagtgatctttttattgtcaggtgggacgacatgtctttttgttggattttatttattttttatacaaccgaagatattgtaatttaagctttttgtctctttacacggctaatttgctcacagtcaaccacgtgatacttaacaaaatagccatgtgaaaaactttgcaacctgcaattagttctatcagtattcacttttcttgtacgtagcattgaattattgaagtgccacaaaactcataaactaaaacaacctttgaggttgcgtccgtgctacaatttcctaatcttgactgccttatttttttttaaatgtccgcgcttctcaaactatatatttcttttaaaaaaaatctatagaaatcatattaatatatttttaatatttagttaatacttaatgaatgatgcgttagttcatcgttttattctgcgtgccgaaagaaatggtttccaacgcagcccgagattcttccacaagtaaaatgagtttactgtaaccatccaactgatctatacagttaaaatatatggagtaaaatacatgggcgattcttaaatttataggggtatgtcatttagtttcttaaactctcaaaaatgcatatataagtcccagaacttgtcatagtgtgtcatctaagtcccaaatcgccacaacccctataagaacctacgtggcgctgatgtggcatgccacacggacagaacgtggcatcattttgactaacaaatataacccatttaaaaattttacttttaccttttcttctccttttcttatccttttctccttcttctctcttttttttcctttcttctcctttgtttgtgacccaaatagaagaaaagaaaaaaagaataatgagaagaaaacgaaaaagaaaaagaagaaaaaagaaggggaaaaagaagaaaaatgacacgtcaagtccatatggcattgccacatcagcgccacataggattatatagggattagttgtgttgatttaggatctaaatgatacactttaacaagttgtgggatatgaatatgtattttaagagtttaagaatctaaatgatacaaccctatcagagctatgcccggatgtgtggatctggattttctcctaaatagtagaattgattatttctggatcgaagatagtctactgctggggggtgggttgtcctgtcgggcataaaaaaggaagggatggttgatggttgcggggaaggttctttggattcttcaggatttagagcggggagacgctagttctagcaggttggtcccgtcccggtttgtctcgtcgcagcaagtcgcaagttagccaatccccactgggtttggatgtcatcatccgcatgctttcttaggcgataatttgaccaactttctctgatcagggttgctgcttccacttttcccctgattcagaaatcagagcagcaattcttcggaaagcatttggtcgttttagtgaggaatttggtcttgacttgagttctgttccatttaaactaggcacctcaggcgaaacactggctctttgttcttttcttttgttctccttcgtttgtctctctaatttagaactaggtcaggtaagctgaagacgctaatgcctgtgatttgcagatgatagtatattattacttttagctcgctgcagccttctgattgctgaagctaactttatggccacatattaaaagctagcccaatgctagctctcaataaaacgacagagggattaagcaccatgcatgcatgccacttgcttaattaggattatgttaggtgccggtaggtgacaaagatgacatacattggcatcgctccagcgatcagcttgcagcctccctcttggaccggctaactaatagctagcaggtctttttttcctcctcgatcggcatttggccatttgcaaattgcacacttgcacgtacaataccctaatttgagtggctatacttctatctcgaaaagaaggtggcgtgccccgttctaaatggtcaggcaagattttttttttccttttaataactatgccgattttcaggttggccatcgattctctctctctctctctctaactgtcatatctagcatttgtggttggttgctatgtctgaagattcagatatgctcgcaccattgtgtggctaatacaactctactaatggatcggagcacataactaccattgataatattggttgtttgtgcgtcaattgtgggttactgcagtttgatcccatgactgctgatcgacgcctaaccagctcagattttcactatagatgaacgtctacgatgccaatttaagaccagcaatggctgccaaagctgcttgtcgatcaaagttattgcatgattaaaccaaaccacttgagttgtttgcacacatgaactggttaagaaagtactagctagtactccctccgtttcacaatataaatcattttagcatttcccacattcattatctagattcattaccatcaatatgaatgtggaaatatctatctagattcattaccatcaatatgaatgtagaaaatgttaaaattacttacattgtgaaacggagggagtagtaggttgcaaaggtaggcgagaatttggtttggtgaagaaacggacggaaagggacgtctatggccaagccagctaggccccagccggcggccggtcaatcggtccttgccatgacttccagagtctctccagctgctagtgccaagaaacgccactgacccggcggcggctaacatatacaactcctactataggagtagtaaacatcaatagtacaacctactcttgcaacacactcgtcggcttgttagctacggtgaggggtgatggtaagaaaattttcgatcgtgccgatgtcgttcccgtaaaaataatatcatttataacaatttcagattttgtcatataaaatttagcttttttatttttaacacgatcgtattgaaatcaatgctaaatagttaaattcataaaaatataaaactctgatcatatcataacataacagttttcctaaaagttaaaatgtaatattgtttccgactattttcagttatgataggatatgaatggaagtgtcagctgactgctaaatgagaaacaataaggcacgataggcatgagagtttggctatagctctcaaacctagccaaaacgcatgtgggacttggcgagcgattggttgctgtcttgtttggtccgtcggtcgcacatccaaccaaaataaaggcaatacgatgatcagatgacaaattgacaatatattagttctcttgtgatgacaatatatgtcgcaggcatgcacacatgcatatcatgtgcgtattttaagatgatgtggcactcaatcagatatgcacacttgctagtagcttagttagcactataatgtaattactttccggccggtaagcaccatcaatatgacgcttgagtggtgtgtatataattttagagtgaattgtattttaaaccatatttttattactaaagtttactttgaaactatccttctttttaatttgatgaactacgtaagtttgcattgcctttgtcatactttagatcactccaaaacacttcttcgcggcatcaaagacctcaagcacatcaactgtgacacgctaacgaactctcatacttcctctgtttcacaatataagtcattttaacatttcccacatttatgttgatgttaatgaatctagacatatatatctatatagattcaataacatcaatataaatgtgggaaatgttagaatgacttacattgtgaaatggagaaagtacatatatgcatgtccttgtttaccggagaagaggctacatataactagagaagataattaaggtggtcctttagtatagcagggaccacacaccacctccgatttgccaaagacaggcagaatgtgcatcttgcttgtttcaaattgtgttgcaggtaccaagttagaggcgcggccggttcaaacccaagaacgttcgaatggacaagtgacggtcaaatggttgcttataaagaagaagaggttgtcaacgaagcaaggtggctagctagcaagtttcgattgagggtcattgcacatcaagacgtggcgttagggggaccaaagcaaggaaagcagctatattatgagtaagagcttcacctgatggagtagtcccgaggatgcactggtggagaaaccctttgtagtcccagttcgtaacccccctttagttccggtttccaaaccgggagtaccaatccgggactaaagatcgctatctttagtctcgggtgaaataactgggagtaaagatcgatctttagtcccggttggtaacaccaaccgggactaaagatcgagctgaccttttttttttgcatgcccctgttgctgcatggtttatatatatatatatatatatatatatatatatatatatatataaaccatgcatatatatgtttcaatacatatatatgcatgcataatatatatgtatttatacatatatatgttatgcaaatgcatatgtatatagatatatatatgaacaaaatatatttacattatagaaaatgtgtacacatgcatatagaaacatatgtagtcatgtattaattacaatccattatatgtcctagctagctacgatttcgacgtagtagtactcgctgctagctcagaagctaaggaccggtgaattgtgtttccgtcgtagtagaattcaccattgggatcaaggatttcttcgttgatgaatcccatgagttgttcttgaaccgccgcgataaattccttgtgtgtggtcaggttatccctcatgcgaataaactatatgaatgtatgaaattgattagtaattaaacaagaaatcgctacgtaatgaaattttgaatttatttgtacgtacatcgagctctcttgtggtgatgatttggtctgcaaggcagtggcaatactcgcacacgtaatagccgcacaagttagttccctgcttttgctttgcgcactacaaataaatgacaaacaacgagagatctaattaatatacacttgtatgtatttgaatcggagaaatataaatgtagagcatgtgtactcacaggaaatttgaacttccgcctaagtctttctctccatttgccgcggaccaaatgacggaaccgataccaagccctacatggagtttaaagctatgattcgtagtagcaattaacataacaagattttcttaattaacaaaggaacttatgacggtacctgtctataagttcgaaaaccttgtcaaacgtagactcttttttatccattgagtcatatacgttgacggtgcaggcctccaggtcgatgagtaaaagcacccagtggaatctgcaatgtgcgtgggatgcattacatatgaaacacttagcaagttcgtacgggaatgaaatttggtatgtaggaagacagtaaaattaaactaactctgtgttgtatggcaacagtatgaacgtcttgtaatgctgcgccttcaggagatggacgagattgtcctctgtttcttgtggatattggtcgagcattgcgacgtttactttctgagggtcgatgaatccagtatcgaaaaccctccgccgtcgggccctttgaatctccattctacaacgataaaagggagtatattattttctatggtctacttatatacaaggacctaattaattaaaggagacgtatagtaagaaatctaactgaacgatatacttacaaaatccagcaactcataatagagacgtcgagggcgtccagctggtatagttcgtagattcctctgaaattgatccagagaatgtcatctccttgcaagaagtccgtgtccctgatcctcgctccgatcatctctctaccggtggcgctcatctccatgtacagctgatggaacttgtacatttgtgtgggtagggactgcagcagctcaggcttgacaagcggtttaccgagttcgtacatgtatttcacttccgccttttcgattggtgcgactcctagcaattgatccatagttagaccggtgtcagtaataaattgttctatcgtcatttctttaccggtcaccaacggctcgatctcctggtttggttgctctccaagctgagggactggtttggactttccagaagatgttttcttcagcgttcgctcatagttcgatagcttgatggcctccttgacagatgcagacatacccctgaagaagttcctgacactggggtctatcggaatcttcttttctggacttcgaggcttgaattgtctcttgacttctgatgcaacgtaagcgtcaagctcctcttgcgtgcaatcgtaccccgggtccttgttcttggcggcgtcaactttcgccttctttgttgcccttgtgtgggcaagcggtggagctgggggggcccttgactttgaaggtgccggaagaggagcttgcgggggagtaggtgtagaagcacgaggaggagtcggtgcaggatcctgaggaggagtcaatgctggagcctgaggtggagacggtgctggcggagcatgaggaggagacggtgcaggatcctgaggaggagatggcggagccggaggagatggtgcacgagacgccgcttgtcgcccagggaggatgatgtaccgcctgcgccatagaacaatggcatggcatgtgtctcgtagatgcgtctcaccgtctcctccagggtaatccagctcgaggtcctcgtacgcgccttcgaccaactcaacttcgaccttggagtatcctgctggaatcggcctgcagtggtaagtacctgaagggtccgttgggatggccatgcccgacgccaccttcatgttgtgagagattatttattagtaatcaacatatataagcagcaactagcggaatggctaaatcttacctttattgataagttcttgaaaggaatatgcagctcacatggtgtctgctgagtgatgtcatcaacgggacaggtcgattcgtcctgtgtttgcatggcgtccatgctctgtgatcctacctgccccgttgaggcgcagctgctacggtttcctgacgggctcaccattgcaggaggaatggtcggctggggatcatgggaccgatgtacggccatgcgttcctcaaccttccttgccacctcctcttgcatgttgagttcgtagctcgatacccggaactctaggtctgcaatcttcgcctcggtatctctcttgctcctcatccgactcctgtacgtgtggatgtcctccttgaaactaatcttccaaggaatcacccctttccctcgagttcgtcctggatgctctggagtctgcagggcgagtgtcagctcgtccctatctctgtctggtcggaacgtgccctgagaggaggcttccactgcatctgttagtcgtcgcgcagcctcttgtatctgatagccgaagaccagtgagccatcagctgggctgagcgttccaccgtgagcatagtaccagaacttcgatcgttccggccaattggctgttgccggttcgatacccctctcaatcaagctagcctccatctgctcccacttcggcatcgcgacgctatagcctcctgaccccaagtggtgatggtacttcttcttggcggcattttctttgtttctttccatcatcgcctgcccttgttcacctgtcttatatgcaacgaactcgtcccagtgatcccttagctttgggaatgtgtcgaagttcggtgtctgccccttcagtatatacttctggtacagatctcccttgaagctctgaaactgttctgccattttcttcagagtccaccttttcactttgtcctctgtacccgcaggaagggtgaatgtctcgagcattgtggtccacagcatctctttctccgaatctgggacaaagctctcatgatctccgcgtgcccttgttcttcgccagtacaccgtactgacaggcacgttatcccgcacaacccaaccgctgtgacgtacatagttcttggcggcttcggccggggcactaggacgtccatcttcttccacttccgttatgatgtgccgaccctcaagcttcttcgctgcacctcgttgcccgcgtgccctcttctgtccaacggagggttgactaccactagcctcctcctcctagttcccctccacatccctttccacgtgcccctgctggttcccctccgcatccctctccacgttcccttcctcgttcaagtactggtttggatcctcgttcccctcttcttcattccagtactggctgcttccctccgcgattgtatcgtacaatatctgttcctcatcgcggtcagccatctgttgatacaagaaacatctgctaagtcacgagacatttatgttttaacaatctaagtcatgtatgctaagtgtaaatgtcgtacattagaaccctacacaaccttacgtgctaagtctaattacaaatcgtgatataagctaagtctaggtgacgtatattatacaaccctagctagtaaataattatatactaagtctaattacaaataaaataatcttatattaaaactcaaataatattacatgctaagactaaaatagtcatgtatatgctaagtgtttcgtgcgtatatgctaagtctaattaagactacaatagtcaattgctacttgtcgcaccaattccgtagtcaataattacataccaagtctaattacaaataaagtaatattatattaaaactcaaataatattacatgctaagactaaaataataatgtatgctaagtgtttcgtgcgtatatgctaagtctaattaagactacaatagtcaattgctaggagttgcaccaattccgtagtcaataatgtcatactaagtctaatttgcaataaaataatcttatattaaaactcaaataatattagaacactacacaatcttatatgataagtctaattacaggtctaataatcttaattaattgcattacaaatataacaatcatttatattattacgtcacttgcctgctccaattccttctagggctagctcttccactcaggcttgacggacgactccgacaacacgtcttttctgcaagatacatatacatatatacatatatatatatacatatatatacatatacatacatatatatatacatatatatacatatacatatataaatacatatatatacatatatatatacatatatatacatatacatatatatatatatatacatatatatatatatatatacatatatatatatatatatacatatatatatatatatatacatatatatatatatatatacatatatatatatatatacatatatatatatatatacatatatatatatatatattgcatttcacgttaacgttcgtcctcgttcgttcgctcgttcacgttcgttcgctcgttctcattcacgttcgttcgcttgttctcattcacgttcgttccctcgttctcgcttgtcttcgttcgatcgttctcgttctcgctctcgttcgttcgatcgttctcgttctcgttcacgttgtcgcggcaacgtacgttgacgtgttcgttctcgctctcgttcgttcgatcgttctcgttctcgttcgttaacggcggtgtggcggcatcggggcggcggttggcgcggcggcgtggcgacggcggcggcggcgtggcgttgtggggccgtggcggcggcggcgtggcgtggcggcggtggcgtggcgtggcgtggcggcggcggcgtggcgtggcggcggcggcattgcgcgcgcggcggcgaaggcggcggcggcgtggcgacggcggcggcggcgtggcgttggcatgcggcggcggcgttgcgcggcgtcgaaggcggcggcgtggcgcgtcgtcgtcgtggcgcggcatctcgtggcgggcggcgcgacggagagagatcgagatcggagagatcgagatgcatgaagggagatctggcggcggcggctctcaccccagagatgcggcggcagcggaggaggcggaggcggcggcgaggacgacgagctcgagacgacggcgagatacggcggcgtcggcgcggggatttgccctaggcagtggcggcgaaggagagaggccgagagagatcgatcggccgaaaacgtttaagtgttggtgaagaagacgagggcgcaccgggaatatatatacccctggatctttactcccggttgttctcaacaaccgggagtaaatatcttttcccgctatttcaaaattctttttaaacccggttagggttaagaaccgggactaaagattatagcactgcatatgattttcgcttacatatgtgtttataaaatagaagttaatgcattaacattatttaaagtacaaagattaatgacaattacttcgaaaaattatttttggctgtaataaattaagtggataaatcgtaataagcaaatataattaataaaaattccaataatcatatatacttagcatatatatgaatgatattattatattggtaaaaactctaattaagatatgtatgtacatactgcatgatttaaaattaataaaaattgtaatcatcatatgtacttagcgtaggaattatattaaattaaatgctaaaaactctaattaacatatgtaaatgccacatgcatgattttaaccttttaaaagttcgaatagtcatatataagtagcatatgaaagatagtaaattaaattgtgaaaaactctgatatatgaatgatagttttaaaaatatattaaatttaatacttttaaaaattctccagtcaattataattagcatatgaatggtagtaaattaaatgttaaaaactctaattaacatatgaaattgccacttgcgtgatttaaaacttttaaaaatcctctagtcaattataattagcatatgaatgctagtaaattaaatgttaaaaactctaattaacatacatatgaaattgccacctgtgtgatttaaaacttttaaaaattgtaagtatcacatataactagcatatacatgatttaaacttgttgaaacctctaataatcgtgcgtaattaacatatgccatacatcaattgatttatatggataatcaatacatccaaaatagtttacatcgtgtacacaataattacggcacgtactttctcctcactattgttccctccttgtgatcgctgcgtgagtaaggggtgtcttcatttgataggaggatgctagggtcaatcgtcaccgtgaaagggggttgcccatccaactgatcgtaatcctcgtcagtcttgtcctcaactccgacgatttttcttttgcctgggagaaccacttgacgcttaggctcatcaggccctctgcccttctttcctttgctagacatgtccttcacgaaaaagacttgcgttacatcattggcaaggacaaaaggttcgtccgagtatccaaccttgttaaggtcaacagttgtcatcccactgtcatcaatcattacgcctccaccagtcaacctaacccataggcaccggaacagaggaaccttgagaggaccatagtcaagttcccatatgtcctcgatggcaccgtaatacgtggcagttgttccatcgtgtcccatggcatcgacacgaacagcgctgttttggttcgtgctcttcatgtcttgggctctcgtgtagaatgtgtacccattgatctcatatccctggaatgtcgcgatcgacccagacggtcccctcgccaggaaggcaagttgttggttgatcgactcgttacccatgagatgttgtcgtagccacgcggggaaagtaccaatgtgatgccgtgtaatccatgcatcggacttaccgatgttcctggcgcgaactagagccaagtgctcctcaatgtaaggagctaccaatgaagagtgttgcagaacagtgaaatgggctttacggaataaattgttgtctaccgtcgttattgctttccttccgagagttccctttccccgtagtctcccttcatggcgtgattcaggtaccccgattgggcgaaggtcttcgataaattctacgcaaaattcgatgacctcctctgttccataacccttggcgatgcttgcctctggacgagcacggttacgaacatacttcttcagaacgcccatgtacctctcgaaaggaaacatgttgtgtatgtacataggcccgagaatacggatctctttcacaaggtgacaaagcagatgcgtcattatattgaaaaatgaaggtggaaatatcaactcaaaactgacgagacattgcaccacttcattttgaagggcttctaatctatccggatcgatgaccttctgcgaaattgcgttcatgaatgcacatatctttgttattgttgcccggacattgtctggaaggataccccttattacaactggtagcagttgtgtcatcaacacgtgacagtcatgagactttaggtttgtgaacttcttctccttcgtgcttattattcgcttgatattcgtggagtatccagtcggtacctttatgctctccaagcattcaaacatactttccttctctgccttgctaagagtgtagctggctggactcaagtaatggcttcctttctcctttggttccgggtgaaggtcgccgcgttgttccatatgcttcagatcattacgtgcttccagtgtatctttcgactttccgtatacacctaggaagccaagaaggtttacgcaaaggttcttagtgaggtgcatcacgtcgattgcgtggcgtacgtccaagaattcccaatatggtaactcccaaaatatagagttctttttccacatcgccgcgtgaccatcttcgctctctatatgctggcttccagacccctttccgaacactactttaagatctttaaccatagcaaacactgttttcccgctgcgatgtttaggcttcgtacggtggtcggccttatgttcgaagtgcttgcctttcttccgtaccgggtggtttgctgcaaggaatcgacgatgacccatgtatacaaccttcctacagtgcttaagatacgtactttctgtttcatccatacagtgagtgcaagccttgtaccccttgttggactgtccggataggttgctaagtgcaggccaatcgttgatggttacgaacagcagcgctcgtaggttaaactcctcttgtttgtcctcgtcccacacggggacaccttccttcttccacaactgtttaagatctttgaccagtggtcttaggtacacgtcgatgtcgttaccaggttgcttggggccttgaataataatcggcatcattatgtacttcctcttcatgcatagccaggggggaggttgtagatacacatcgtaacgggccaagtgctatggccgctgctcatctctccaaaaggattcatgccatccgtactcaaaccaaaccgtatgtttcgtgcgtcctttccaaattctttaaattttctgtcgatgtttcgccactgcgaaccatcggcgggttgtctcagcatcccgtcctgttgacgctcttcagcgtgccatcgcaacattctagcattccccttgttcctgaacaaacgccttagccgtggtattatagggaaataccacatcaccttagcaggaattctcttctttgttagctgcccgtcaacttctcctggatcgtcccgtctaatcttgtatcgcagtgctttgcaaacagggcatgcttctaggttctcatactcctcaccgcgatataggatacaatcgttcggacatgcgtgaatcttatgaacttccagtcctaacgggcagactatcttcttagcctcgtacgttgtctcgggcaatttgtttccccccggaagaatgttcttgacgagtttcaataaatcgccaaatgccttgtcactaaccccattttttgccttccattgcaacaactccagagtggtatccaactttttgtgcccctgctcgcaacctgggtacaacgaagttctgtggtcctccaacatcttgtccaatttatgggcctccttttcactttcgcagtcctccctggcgtcctgcaacatctgaccaagatcatccgcaacgtcgttaccatcagcagctatttcctcctcgcctgtttgatttccttcaaatccaacatactgagcaaagtccggaatattgtcgtcttccacttcatcttcttccatttcaacaccttgctctccgtgggatgtccaacaattatagcttggcatgaaccccgactcaaacaagtggaaatgaatagtcctggatgcagaatactccttctgattcttatacttattgcatggacaacaaataaaacccctttgcctgttagcttcggccactctcaaaaaatagtgcacgccgtcaataaactctttggaccgccggtcagcgtacatccattgccgatccatctacatgagtcaaaaaaaccgcacacaaataattattcttacaataatgacagtcatacaataattataagatatctttattcatacaaaaatcataaaatattacaccaaataattcttaaaaactatttgtaaagttttaaactaattttaatgtgttttacttcttttaattttcattttagtttgttttctattatttaagattaactttcactagagttttccttctcaactattttataaaaccttgtttagcaaatgaactaaatttctatatattctttcttccccacacacattttctctctcatcaacttacaactaaattttggagacaaaaaaaagtgtgcaaaacataggtgtaaatgtagtatgacaaaaaaaacattggaggatgaagttacaaaccttttaggcacctccgatttgtatgtaatcaccaaaataaattcaatagaaattttggcatgacctcccctcttttttgaagtaattttgaagcttgctcgggcagctggaggaggaagaagacatatatataggggtgggactttagtcccggttggtagcaccaaccggggctaaagatcaccgggatcattagtcccggttggtattaccaaccgggactaaagttaagatctttagtcccggttggtaacaccgaccggggctaaagatcaccgggatctttagtcccggttgataatagttaagatctttagtcccggttggtgttaccaaccgggactaaagatcccgggggggcctgacaggtcctgacagcattcgaaccgggactaaagatgatctttagtcccggttggtaacacaaaccgggactaaagagcaaatatgcccgtttcccttttgaaccgggactaaagatcatctttagccccggtttttattgcatccgggactattgtggaaatcggccgaccgacgaaagatatatataggggtgggactttagtcccggttggtagcaccaaccggggctaaagatcaccgggatctttagccccggttggtaataccaaccgggactaaagttaagatctttagtcccggttggtgttaccaaccggaaataaagatcccgggggggcctgacaggtcctgacagcattcgaaccgggactaaagatgatctttagtcccggttggtaacacaaaccgggactaaagatcaaatatgcctgtttcccttttgaaccgggactaaagatcatctttagccccggtttttattgcacccgggactattgtggaaatcagccgaccgacgaaagatggtttctccaccagtgatgattagagcatcaccaacagtctacctatataattcccaaaactaattttgagggattttagtccaaaaattagctccaacagatcccctactctcctgcccgagttttggagttcccttcccccggttcctcgctccgtttatatgcgggcgcgaaagtcgctcccaatcacgcaatcccgcctctctccttcgttcccgtgcgtgggagatagcgatctttctgtgcgtgaaagaaaaaaaacggaattttctcttggtagtttaacagaagggcccacttttaagttttggggattgaatttaggctatctgttggagggaggagttttttcacttccatttttcagtttaggaaacccaaaaacaaatttttaggagaaaattatggataatatgttggtgatgctcttagtatgtattatgttccccacttaaaacaaaaaaaaatgcactataataccttagacctatattcctttttaagagcatcattccgtcaagggtttggaggcctatgtataaatgcatccgcccatcccatcgtcaggggaaaggtaatacaactgagaatctagaagctaatcccgaatattcacatctttcctggcttctctgcttatccccgattatctatgattcattgtcataataggttcaaattaagtgcaataaagacaaatttacccaacctaaaatgaaaataccggacaaatagttatccatagtaaaactttgataataaaagttggcgcaaattgcaagaatttactctatatcctacctatgttctaatttgttcagggggacatagataaacaaggatccatctttttttcacttgcccttttagcttgagatgttggcatttggcaacacttgggaagtatcaacttcttccaaatgatagtactagctcagatgcaattcggcataaaaggtttttttttatctgacatgtgggcccaagggcattttagaagtttcacgcaatttctctctcctctctaactagaaattattattttaatgggtgcggtgtccaccagcaaatatccaacttttacgagtgtcttttcccaaaagtcaattcgcgtggtgtcctacagctaaaaccgcgaactcacaatgtcctgtagtaaaatttgtcttacgttaaaagggagcactcctgcgtggtactcgtgtgttgtaagagtgtgtgtgtgtgtatatatatatatatatatatatatatatatatagtttaatagttgtgaaaataattctttttcatcgtgcgtgggtaccacaaccccaccggcatatattagtttggcagttcaaggcgtgattgagcataactaatgaagataatctaaatgacgctctatcaaacttcaacctttaccctttactcgtcctagctaagctacctgcacaagataatagataatgtagcacatctatcgatccaaaatgacatatacgatctttttcctgatatggtgcctctttacgcactggataggcagatagctacaacgaaaatgacataaagtggtgagtgcgcgaggggaaaagtgtttaattaatcaaggctgcaatgcattttcgttcgtggatcacacggctaggataactatttttacataatgtagttcatttatacagtcttaacgactctgtaaatgcgagtttcatgacagtctgaaccgcctataaaaataaatggtatgtcacattttgttttgtggaccatactacgtctgcgaaaatgaataacacgtcgcatttcatttgtggatcacaatactgtataataactactataatccaagctctccctctctctcacacatacacgaaatccaaacttgtagttcggtggagagaaagaagtgagaaagcaaggttcaaaataaatctcaaattaatacaagccaaaggcacaattgcacaaagacaagcaatagagccaacaaccctagtttgtgggtggaggggctatttatagccacaccctcagatttgcctgttggaggcaaagattttatttttgaaaatttctgaagtgttttcgtaaatatccgaaaatcatcagagaggaaaacaactttcggaactttctacggtactcttggagtttgctacagtactttttgaattttctctgaggttgctacagtggtttcggaattttcctaacagtgcaaattttcagcaagagcatagcaaaaaactgggcaaaataacatttaggaaattattatatatggtttcttaataggacaaccggtaaaattaccctatttcaaaaaaaaatgagagtttgtatcgaatatttgtgctctaaaaaaatctcaaatgaaaaactttctgctacaaagtggtaggtcttgtcgagaggtataatttcacataaagtttttcatcgtccgatttcacataaaaatcaccctattttcttaagaaaccgcttctaaaaaattatgacttttcacatgtggttccttaggagtcgcaaaccgtgcatagaaatatggctttcatgtgcaagtttgaatatgtgaaaaatcataatttttagaagcggtttcttaatttttcatatgcaagtttggctttcatatttttcacatataaattaaaaaaccgcaagtgtaaattaatttttgtcatataaattaagaaaccacatatttttcatatgcgattgttttaaggagtcgcaaaccatacgtagaaatatggcttttgaaaggctctacgattacaatatgtccttaaccaccttcacaggtggctgcaaatttgaaccgcctgtgaacaaaaaaaaaagtaaggcctgtaaaaacgcttttatacagtgtcactgatgaactagttagttttcttggccctcgatcattgcataccatttcaccgtttcactttcagtttggcggcaatctgccgctcttactcctactccctctgtacaatgcaagtggactcctggaatatcaaagaagaaatcagtagatatgagaaaagacccaaatgcctctcgtaatgtaaaagtagtaggaaaaattgatttatgccattgcaaatttactatattaaaatagtattattactattcacctattttgaaccatatcatttcacagttatttggtatatgccactacttattctttcaatatattttgtaaaaaaaattacccatcttccttcattctcctatattctgttcttctccagtgaagcaatgccggagccggatagatccaatgagatggtggcggctggcggcagtggagttgatcagatggctggtgacagatcgccgttgcagctagcggtgtacagctgctagcaactggttggatccagagagacggaagtagctagagagtagagacgttgctcccagcgaggtggagaggactaacagggtggagcagattgggcagcttgcggtagattcacggagagtgatcacgaaatagatacccccgcgtcgctctcgcgcgggcggctcggggggtgaaaaaccctagccgcccacgcctcccctcttccccccacctcgccgccgtcggagctcgccggcggcgaagccagcagcgagcggggatggcggctgcgaggcccttctcttcttggcgtcttcttccttggcactacgtggacgggacgaacgacgatgacccccaccacggtcggagttggcgatgtcgggccggtgcgaggaggcggcggatccagagtccctaagtcctgatccggccatcctcgcctgaatctcggcacgaggcagctaggggcggtggtggcggctcggcggcgttgtcgcaactcggcggtggtggcagcttggcggcggtggcatctcagcggcattgcgtggcggcggtgccggcctagatgcggaggcggatgcggtcatggtgcatggcggcggcgtgcggccgaaccgtgcggcggcggcagctcgggggcgtggcccgcccatgctggcggcggtgctggcgctggtcagcgccctaccacctcccccgccttcgccttcgctgccgctgagccctatggcacggctaggcctcgacgactgggcagtcgggctgccgcaggtgcccttagtggctaggtggagcggcacgatgcggctaggtggggcaaggaggccggacaaagggggcgccggcaggtggcgccggagccagagcgacagcgtttccagcgtcggcgcaggcctagatggtactgcaaagggagttggcggcggtggatcgtcttcctcattgtcggtcagcaccctcgcccttcctggagctcctccccttctttgtggggagtttctaggctggattgaggctgtcgacgtttgatgtctcgactacggtatttggacagtatggggatcgttggtgctaggatatatgcgagactgaggtaaaagagatggagacagggatttttatacaggttcgggtccctgagcggtcaggtaatagccctacatcctgttggccggagccgatgttgctttttattcaccataatcacaccagtacaatatgtggggtagcctatctaactgttgtcgatatggtggtctgaaggtctgactcatagtcgacaacagggtagccttcctcctcgaatccgtgtccggcgagatcagagatagcgctttcgtatctcctgacggtatccagagacaccgtaggggaatagccatgcctatccctaaagtcgatatccggcggagtgtcttggcgtatgtaggcttgtatgttgtggcttctggtgggcgtgtgttgatttcatgggtgtcttccatggtctcctctcttcttcccctcctagggggttttgtatttatacccataggtgtccccttgtacaagtagaactagggagaccaatatggatacaatccgagtagtccttgtcgtttccatgtagaactctggttgtctttccttatccggaactccctccatatccgcaggttgtttccgtataggacatggtatgtggtgggtcctgccgagatttagtcaactactattaggtatgtggtatccataaccatgacagaggcggcagcttgtcagcggggaaagctcaggctgctgaagcaatgctacccagtcccgggttctccttcagccagatctggcgaggaggtcggcgggtggttgaacggaggggtcctgggtcagctctcagggatggtggttcgatgaagtcagccgacggaggggcatcggtcgggtgtggcggaagccatgtaccgccgatgctcagatggtggattcggattaggtgacggaccacggcggtagaaggttccgagcgaaagcttagcccaatttttttgggccaacagtgacttcgcctccgggcgtggtaaccctcctgaggagtgttgaggtacccttcctccctcggcaaagagctctgagtgaaaaccttgtccaactttggacggatgacgacgacgtctttcggcgtcgcgaccttcgtgagggtgtcattttagagtcttcgtgtcgtggtggtgttgttggcccggtggcgattggtctcgcatagcgatgtccggttcggtgcttggcttccctctctgtagcgtgtgtttaggcgattggcacatggttcagggcgtgtgctctggtgcacatccttcctcaacagctagctgtcgatgtaaaatttttcttgtaaccttttcttccaatcttaattacgttgaatgacctccttcggtcattccggcaaaaaaaaagattcacggagagtgatatgacaaatttgtaatagcataaatcaaaatatatttgcaatgatatggatagtaatgaaatattttttaatatggtaaatttgtaaattgtaaaggtatgggttaaaatttatcattttagaagtatgatcgtttcgtaggtagcaaagtttcaagctctacttcctctcctcatgtcccgggctcctgaacggtgacctctaatttgtccgtctgtaccggagagcagccattatcgttgctacttcctctgttttacaatgtaagttatttatatatatgtctagattcattagtatcaatatgaatatgaaaaatagtaaaataatttatattgtgaaacggagtgactagtaattttctcaagtacagtggacgaacaatcaaccctcacagatcaaaccctcactagctcgttgtctcggcggcaacgacacacggaaatctgtagggtaacggacgatccaccggatgtcaaaaatgtccgactacgaaaacgaaagcacggatcaacagcaggcacgggcgagcagcggagccctgcatcgtacgcgtgcacagttgcatcgggtcggtatatatccacgtcgaagcgttcctgcctgctggctgctgtgctgctgcatgcacacgctaccataccagcggtatgggccggccatgtcatggccgctgtgccggccgccgtaccacgatgatgggttcagagttcagaccatgaatacgacgggcaatcgatcgctactagtgctcgaagcctcaggggatatgaccctacggagtagtaggcgactacagttatcactcagatccagggctggatgctgttggtaccgcgagttttggccgctgttcgcctagtatttgccaggtacgcactcgcgcggcacgcgctccgcgaggaccgacagcgactcgagctggcgcacagtgccacagcacgtctccgggccccagggcatagcgatcgaggggccggacagcgacggcggccggggattcgcggggccaaccgcgcgtcatgcgcgtccttgcgatcgggatcgatcgaacggtgctttgtccccgccactcaacggcctcggcggcatggccagggtcgaggacttgccctttagtgtacaccagtcattgcatgacaaagcttggaggcttatcgatcggcgagatggtcaaaaacctctattttaccgaaataacatattacggagagatttttaaaaattacatacaagttacactatagttacagtgtaattacatgcaagttacagtgtaattacattacgattatactgtaattacatttatcaaatttttgagagaaaatttgtcgacaaatatatagtaaaatcgtagccaattatgccggaaatttcctgtcatcctcccgtgatatgggccaaaatttaggccttcataaccaaggccgagggttgggctgtatgatagtgttctggtgtccacggagagtttctgagttgggctcttgattcttgacgtaagagggaaggactaagtccactataggcctctcaatttatcatcaagtctgaaattagtcctcataccgaaatacaagatacaatgcatctcgcaactctcaaaaccactgcaactaaggtccaaagtggtttgaacaacggtttcagctgatgtgacgcctacataaatggtttgatttaatccccgtcccacgtagcttagctgtggcattaaaatcaagatcaacaaattttaaaataaaaatgaaatatatggatccatatgccagtcaaataaaaacataaaaaatataatgcaacccacatgttgatggatcccatttcctccatctcgccccctctctcctctctatcttcttcatgtccacggtgttacatctcatcgcaaccctccctccctctccccctgtcgtcgcctccactcccccatgcctacctcctcaaggcccctccaccgccactgcctcgtgtcctgggggggaggagagaagcccacaagcctcgaccggctcccgctgccgtcggagcaacagcccgttgttcaccaccacgggttgcggagggaaccggggccctgctgctctcgcctccctctgcgtcggtatttagacagtagtcactgaggggcagcaccatgaggtgggcggcacgtttcgcggggcttgggctggggagccgtcacgctgctttcgagttcatcaaatagaaacagaaccaacattcacaatatttactttgaaattttcagggctttcttgaaggaaaagaagaggagatccaatggatttcttttttaatcaatttggagggagagacaatggcatggccggatcgagtggaggaggcggcatcagtctcgactgtgcaaaagagttccatctgcaggaggaagacgacgacggtagagcgatggggtccaagtggttagtgagatgggaaggagatagagaggagaaagaggtgaggtggaggaagtgggtcccactatattttttatgtttttatttgactgacatgtgggtccatatattcatttaatttattattgttttaaattttgattctaatgccacatccacaccacgtggaatgaggaccaagtcaaactatacatatagatgtcacgtcagctaaaattggtgtctgaactaccttaggatcgtatttgtagtagttttaagagttgagagatatgttgtatctggtatttcacttgacgaacgaattttagactcggttaaaaatggtgaagtaaacttattcccatgagggaactgcactctggatcttacattaagcccatatacttggtgggccaatgtccgtgcaattcttgtttgagagactgagatgtactagactactactccctccgtcctaaaaaaagacaaaccctggtttccgtgcccaacgtttgaccgtccgtcttattaaaaaattataaaaaaaaataaaaagacaagtcacgcataaaatattaatcatgttttatcatctaacaacaatgaaaatacgaattataaaaaaaaattatataagacagacagtcaaaattggatatggaaattcagggtttgtcttttttttgagacggagggagtagagtagtaggagtatatgttgttatacattaacttggtttagttcctctgatgattatatagcgtgtagatgctcaattcaaaaggcaaagagaacagattgcctgagaggctgagacggtcaagacctcataacttctcttaacccgaacacacggcagcaaatttgtcacgatcaagcacttaaatgaagccgttgattgtggggtctagaattcttattgtaccgtcggaaaattgacgcctgcacacccccaccccttcttccacgatactagcacgactgatccacatttccacaaagccgatctccacctttgtgagtcgtgaatacgtttgatcgagagtgtccactccatttcatgggcaaaaccgaagtgataacaccgcgtgcatttgttgccaccaacaaacagagggtgacggcatgattaggaaatcagagggtgggtgatggagaccacactaccacacaagtcaggtctccgaagccggctgtgttcgcatgcaccttttcccatcgcctctccttcgttttccgcgcgcacgcttttcaaactactaaacgatgtgttttttgtaaaaagtttctatacgaaagttgcttaaaaaaatcaaattaatccatttttgaaaaaaaaattagctaatacttaattaatcaagtgttaatggaccgctccgttttccgtgcacaggagttaggttcccatctcccccatccgaactcagccgaagcccgttccctttagttcttacaatcttaccaagtcataccaatcagttgatcgttgcagcaaggggtcgaagtgccacgatagtgaccggagtgtaacgaagtttacatcgtgttgcctagcagcaaagaagaaaaatatcgtcgaccccaccggccaccacggcgcacaggagtcaacagcgaagaccggggcgaccaaaatatgccacggatcgatcggaacgcgacgaacgcagacggggccccggggcgacgcacgcttgacgaatccatccgcagacgaaacagcgagctgcgctgacaccgtcgccggcgcggctcccccgcatatatcacgctagcgcacggagaggcgcaccgcaccaccgctcgtgttctaccagccaacccagactcgatccgcggccgcgcgcgcctatccgcagcgaagaggatgacgccgcggcggcggctggcgctgcccgcgctgctgctgtggtgcctgtgcgcgctcccggccccggcgcggtcacagagcgcggccacgcccgcgccggcgtccaacgaggggttcaactgcacggcgaacgccacgtacccgtgccaggcctacgcgctctaccgcgcgggcttcggcggggtgccgctcgagttagcggccatcggcgacctcttcgcggccagccgattcatggtcgcgcacgccaacaacctgtccacctcggccgtcctggccgcgaggcagccgctgctggtgccgctccagtgcgggtgcccctcccgctcgcccaacgcgtacgcgcccatgcagtaccagatcaacgccggcgacacctactggatcgtctccaccaccaagctgcagaacctgacgcagtaccaggccgtcgagcgggtgaaccccacgctggtgcccaccaacctcgacatcggccagatcgtcacgttccccatcttctgccagtgcccgaccgccgcggacaacgccaccgcgctcgtcacctacgtgatgcagccgggcgacacctacgcgtccatcgccacggcgttcgccgtcgacgcccagtcgctcgtctccctcaacgggcccgagcagggcacgcggaacctgagctccccggagattctggtgccgctccgcaggcaggtgcccgagtggctgccgccaatcgtgcgcgtgaacaacatctccacgacgcccgcgtccccgccgccgtccaatacgcctgccccaccgtcgtgagcaacaatcgagacggggtggtgaccgggctagccattggattgggcgtcgtcggtgggctgtggctgctgcagatgctgctgctgggctgcctgtggaggcggcttaaggcgagggggcggcgagcggaggcggtggcgagcggcgatggcggcgagggcggcaggtttaccaaggccgcgtccggtggcggcggcggcggcggcgggaggttcttggtcagtgacatatccgagtggctggacaagtacaaggtgttcaaggtggaggagttggagagtggcacgggtggtttcgacgacgagcacctcatccagggaagcgtgtacaaggcctacatcgacggtgaggtgttcgccgtgaagaagatgaagtgggacgcctgcgaagagctcaaaatcctgcaaaaggtacactctttttcttccataactgaattgttcgtttcagctcactcccaattcagaatgaactgtttctttttcctgtattttccctgaaaattggcttcggattgctaatttactgctaacagaacgaatcaataattgcttaggtgtcttgctgcttactagtactagctcaaatgagtccactgaaatcattggttctgagagagtgattgaattgtataaagaataattagtgctcgtattcgatgattagattaaacagaagtacgcacttctatacattccaacgcagtgagttgttcattggactagcggccgaggcactagagcaaatattttagagtcatgttggtgtctggatttccttttgttggtacatggataatttgttttggagtgacacactgacactgatgtaaaaagccttttagttgtgccaatttggactgtgcccagcagtagcgatgctaatggagttattaagaaattagtgttcgatctgtcactctgctagtagagacgtagagttaagaagttaagatttggatctgtcactcagctgctgccatcagatggtcagatgccttgagacgattcttaacggcctgctgatagcataatgagccttagaaaattaaaagggccgcccatgacccatctgcaaacgtaccggccatgtgataggcttcaatgtttaatctcaccatcgattgttatttgaatacgtttgaaccgtgggagatttgtagtgccgtgataattatgatgccgccaaagagtcacgttaggtgacgatgaagttcgggttgtcctctgatccactgggaaatttggaaaccttgtgccttctataccgtatcgtgtttgatccgtgtctctgttagtctctgccacgaacgcacgagcactgcatctcaccacgtacctaggtagctgcgtgcaccgccgaattgttcttcgcacggtgatgtacgagattggattttacgacgttttttcaacgaaggctgctgcatcgacagcatgaacattgactggctccttgactaccgactacagtacgctttgagatgggaccaggtccttgacctgcatcacatatgcacaaccaactcagggctagttgtggaagctttgaactaaactacaggataatgataggagtgacaaagtatgccaaattgccaattgtcaaatggcatttgcattttttttagtattatgtattttcctctctttttttttcttttgcaaaagaaccagttgtgtgcccatttgatctcagaaatcagaacctgtcagtactcagtaggttgtagcaaggtgggtgttgatgttggcaacattgtcgcaggtgaaccacagcaacctagtgaagctggagggcttctgcatcaactcggaaaccggcgactgctacctggtgtacgagtacgtggagaacggctcgctggacctgtggctcatggaccgcgaccgcgcgcggcggctggactggcgcgcgcgcctccacatcgccctcgacctcgcccacggcttgcagtacatccacgagcacacctggccgcgcgtggtgcacaaggacatcaagagcagcaacgtcctgctcgacgaccgcatgcgcgccaagatcgccaacttcggcctcgccaagaccggccacaacgccgtcaccacgcacatcgtcggcacgcaggggtacatcgcgccggagtacctcgccgacggcctcgtcaccaccaagatggacgtgttcgcctacggcgtcgtcctgctcgagctcgtgtcggggcgcgaggccgtcagcgacgacagcggcgagccgctgtgggccgacgcggacgagaggctgttccgcggccgggaggagaggctggaggcgcgggtcgcggcgtggatggaccccgcgctcgccgagcagacgtgcccgccgggcagcgtcgccagcgtggtgagcgtggcgaaggcttgcctgcaccgtgacccggcgaagcgccccagcatggtggacgtggcgtacacgctgtcgaaggcagacgagagcttcggcgactactcgggcgagagcgtgtccgtcgccagcagcggcgggatcgcagcgcggtgaggtgtcgcgggccaatcatccccagtgcccgtgtttgttagtggtagaacttgtactagtagtaaatagcgagtggcgatagagagcaggtagctaaataatctctgtcgttacgttacacgcgaggttgggattgtcaattagttttcgtggggagaagttggttgttacttgcaactcagttgtgcagaaactgcatatagaactatagaagcatcaagcatttctgtgtccgtcgggactcgggagtaccaaatgaaagtagcgatagatcaccaattggcggcttcacatacggcagctgagatgcgatcctccatccagcaatattacagacagattccaaaccttgccagtccacaatggcgctgagaatcaaaggccgaagggaaaagggagaagagataagtctatttagcctctctcatatcttgcctcggtcaagtcgtatctctcaaccgcaaaattgggtatgttgtctcctccaacttcagaaactggttcaaaaatagtcccaaagcagtattgaacccggtttgggcttacatgtcatccacataacgtattgactaggtcaggaaaagaattaaaaacaataatacccacatgtcagggaccctatcttcttccgtctgcctcctctcttctccatctctccacctctccactctcttccttgtgacctccaggccgaccggtgagagaggagcaaggcggcgtgtgggagaggagcaaggcagcgatggtatctcctatctatcgagcgtggaaggaggatcgagctaaatggatcatgtgtatggcatgcttggattgcagttgcccgctccattgccgtgcttcttcgcaacactatcgcctcctccacccctcccgtatccatcgacgacctcttcaccgccagatctagaatcacgctgactactctacccatggccaatgcgtcattgttctgggcggttggtaagtgcgaaggcggcgcagatccggttaagaggcggaggagcgaaggcggcggtgtagacttgagcgcgcgatagcgacggacaggaagaggagaggcggcggcaacacagacctgtagtgcatgacggcgacaaagagacggaagagaggaggcgctgaatcccgccctcctaaggtcgctagtgctggatctggcccccaatggccgtcgacgtcttctccgccacccccaatcttaccacagacgagtctattgtacggaacttcctgttgacagaaaacacgaggcctgggagatctgcttaactccagtgcaggttcaaagctcgccttcaaatgtatgagcgtgtcagttgatttgatcatgtaatcaacaagaaatagaagcaaaaaaacgcagttaaatctataaatgatagccgatcggctaggtgccgatgacatatcatttatctttgagccaatgtcatatatgcatcgatcagcagtcattaataaataaggagggactaaatctactcgatcggctacagatattaccaatatataatctttatatcgatatatacttaaatcaagtgattgtgatagatcggtcaccatgccgagacaatataaatcacttagatcaaaatatatattaataatgagactatatacgttcatagcatagccgatcagatagatctagcatgtatcggctaataatccgataccactctatattaagatattaaagcaagtagaatatactaaacaaaagcctaatatacttaaatgcagcaagatcttaacgtaaagggcagatttaacacgtcaatcaagtatataggataaaaagtagttaaatcaggtaagatcggctgaaactccgatactaccctaatcagcaaccaagaagcgggctagagattgagattctaatcacgactcataagatcaaacttaactgatgcagctataagtatgaaaagaaggacaatatctagacaatcaagccgttggatgtgtcatagagtggtagatatcctatataatctaagtcaacatcggtatttaacctaatcggctaccttatattgacggatgttagccgattgtaggttggatatcgatattgccaaggattgtgtaggatatatgataactcgatgaattacataaacaagattagagtgtcataaagatggaagcactaatcccgagaacgcaagccgccataacaagttttacctcttgttgaagatcgaaaccgatgcagctcaacccgaaagcaagaactcatcgaaataaaactaaagcaaaaaagggtggcgatgcgccgagtttgtattgaacctgtgtgttctaagttacatagggctcgggtctatttatacccgaaaattacaagatatgtccataacggacacgactactatctctaacaaactctaagataccataagtctttgcggcagacttttgccaaagcatatctctaatgaaattacctaaaacatcctaagtaatagatacaattgtcttctcaggactctatccatgtgcggcaatcaccttgaagcacctcaattcaacctgatgtcatacatcaagttgcattgttggaatcggctgcatcggcttacctagcccgactcagacccagccgatcctaatcgtagcttatctggactccagccgattcctgctctgtttccgaactcgatctccgcctccgactttgcttcgatctaatcttctttcccgatgccgatattaccaaatttggttgttaacacctccttactgtcggatgcaccgtccttgttccccccacggtcagatcacgtgcgcagcgtgcttgggctggctcgaccagcagccagtggctcactggcgttctccttcgactcggcggcatgctgacgacagagcacatgcactagctcgcgcttggcctggagcttagcagacaacacttcctgtgggtggtgagagagagagagagagagaagaggggggagggaaggggggacaagttgtgtaggaggaaaaaagtagtagtcacttacatgtgggctcatatatattttataatttcttctatgactaggatgccacgttagccaaacggaaatgctacataccggaatcccgtccggacgggacacttgttattcaaagaggagcgatacctcaccatgcatgtcccgagcagcagcagcctgtacaggacatggtgccgctccagcatgcacgcatggctgacatgggcggcggtgctacggcgcccatgcccgcaccgtcgacgcactaccccgcgcgcgaccgcgagctccttgccggcagctctggcgccggcgcaggggaggaggagcccagcgcggacgcaacggcagatgaggaagtagagcgcgaaggtgctgccctcgccgcgtcgttggcgtagagcacgacgagcacgtacttggctagctcgtcgaggcggcggaggaagtggtcgcccgcgacaagctccgacgtggcgtggacggtgcatgatgtgactgtcggcgacgagctccggcgtgggacgtggatgacgaaggacacgcccgtcggcgacaagctccgtcgtgggatgtggatgacgaaggacgcggccaccggtgacgagctccgtggcgtcgacggtggaggatgcggccgtcggcgacgagctccggcgtggggcgtggatgacggaggacgcggccgccggcgatgagctccgacgtggcgcggacggtggaggatgtggccgccggcaacgagctccggcgtgggacgtggacggtgggaccaccggcgacgatgctttagtgcccggctcctgatatctggtaggtattgtctgatacctcataagtattaccttctacgtgataagaatcgcatgatatctaatactccatccgtttcatattataagactttctagcattgcccacattcatctagatgttaatgaatctagacatctagatatggctagattcattaacaactagatgaatatggataatgctcgaaagtcttataatataaaacgaaggaagtaggtatcatttgatacctaacaagtatcacctgataccggttaggtatcaggacctaatacctcgtaagtatcaccctctacgtggtaaaaatcgcatgatacatgataggtaccatctgatacctcacaagtatcacctgatacgtggtagaatcgcatgatacctgataggtatcacccgataccggctaggtatcaggacctgatacatcgcaagcatcacccaccacgtaataagaatcgtatgatacctgataggtatcacccgataccggctaggtatcaggacctgatacatcgcaagcatcacccaccacgtggtaagaatcgcatgatacctcataggtatcatatgataccttgcaagtatcacctgatacgtggtagaatcgcatgatacctgataggtatcaggacctgatacatcgcaagcatcacccaccgcgtggtaagaatcgcatggtacctgatagatatcatttgatacatcacaagtatcacctgatacgtggtagaatcacatgatacctgataggtatcacccgataccggctaggtatcagaacctgatacatcgcaagcatcacccaccacatggtaagaattgcatgatgcctaataggtatcatctgatacctcgcaagtatcacctaatacgtggcagaaacgcatgatatcagttagatatcaggatttgataagcaccatgtatcgtttatcaagaccgatcccaccatgtatcaaatatgatacttggccatccgattatctggtacttgataccaaccgatatcacacacgatgcctgttatgaggcatggcacccactcggtatcagacatgtgtgatgcctgttatgaggcatggcacccactcggtatcagacgtgatacctgataatagacttgatgctcacccggtatcagatgtgatacctacctagtatcagatttgacacctggtagctaggtaggctactacttgctatactgaactagtttagctatcacatgaagattttttgcgtatgaacgtggacaaaatgacaaacgatagggtgacatgacgcaccttttgagacacgatgacagacatactaattgaatggaaggaatcgtccagctaaattgcttgcaggcctataccgtccgaacggtataccgatatatagcgccccctagccaaaacatccatcaaaaccgtcgagggagtcattttgcactggttttaatacttaatagaacaaatatatcccctttttcggttgagggatatgatttaacaaaggacaagagctaagggaggtagaatagacttaattcgtggcacactgctgcactagcccataaatggtaacttaaaaagtcctagacaggccaagcctttttcagttgagaattacgttaattgggccaccgtggacattttcaacgcaggggattgttgtcattttgttacattctgaagcgatccggcttataatcgtctatccaattctgtcaaggacgcaactaacaactttgcagtctattctcaacatccctcaagccataaccgtgtaattaaacagaacacaacatacaagcaggtatcagttaatcctcttgcaccaagtgacattccttatgcttgaactcgggtatcagagttcggtttgtactaatgcacatgttggcacgaactagagctggaggcatgcatgtagacatactattaaagtggtttactattaatctagtctattgcggagatgtacatgttttattttatagatagcaccttactttaccattgcgggtgctcttatgtctttaggctgtgtttgcaacccttcttcccaacccctccctctcgttttccgcgcgcacgcttttcaaactgttaaacggtgtgtttttttgaaaaaagtttctatataaaagttatttaaaaaaatcaaattaatccatttttttaaaaaaatagctaatacttaattaatcacacactaatagaccgcttcgttttctgtgcggagagtaaaagttgccatctggggcatgcgaggcattaagctatcactcaaattttcatccaaattttagtggcatcaagctatcactcaaattatcaaatactcctaataattaatcacaacacgcagaagacgaagacaagttgagtagtagtggtaggctagtagctgtaaaattgcgtacttggcctgcagagctgaagtgtgcctgaaaccatggcataatccgtccgagactcagaatcgacacaagatgagaactatttgcagctggaaggtgacgtctcaaggctgccatggacattattgcccacgggaggacgagcgttatcatctgcattctgcaggcttggcgtcacgccatcctgcatcaagccatgaactaaccacatgaacgactttacctcatgtaaaactcttgtcttgctactcgtatcaggccagagtgtcacactgtcagtttgtcaccaccccggggggcccgtgccaattgccatgcatgcatgccttgctatcaatcctgctgctgctgtacaagtgtgtgaactcgtggcgccatcgacagctcgatctcgttttcacgtacaatgactggcagggctcagtaggagtacttgctagtatagtgtaaaaagccgaaaaccaagattgaaagggatgaaatagtatcttggtaccacatgtttatgagaaattttgaaccatctagaattctagatttttcaacagtaccttggaaatatttttctatgaaaaaactttttaatagaactatccatatgcgtgattaaataagtacatcagcagcagaaatgttacctatcttctgtttaacatttggaatgagacgaagggaagtacaaaagagtagatgacgtatgttaccagcaagttgcaagaaaagtgaggactccgatcatactatggcttgtaatttcacactagcatgcacaaatgcatgtgcttaacatagtgagatgtcacgctcctcgctaaaaattgaaaaaagaaaggtaagatgtcacgcttccaaagaaacaataatccagtagcactagacacagccgctcctctcgtcacccgcgcatcagctcatcgacgtgtgccaataattcatgtatcaacaacaacagtagtactgttccattatctgagaaaacaaatcaactacaacactggcttgtgtgtctgtggctgtggactctgccgcatggtgcttgtgctaattgtgctgattccctcgacaaaacaggggaccaacagggagctgatctgttcttccagattctttcttggtgcttattagttcctcctccgtttcataatataagttattttaacatttcctatatttatattgatattaatgaatctagacattgacatcaatatatctagattcattgacatcaatattaatatgggaaatgctagaatgatttacattgtgaaacagagggagtagttccgtgaagaggttggtagtgctcgatcatggtagcctcgttttgccttggccaaaactaaagtatctctgcttgtgctgtctacttaattgatgttatcaagtgtccagcgactgatcaagcttttacttaattgatggttcattctgtacttaattagctactattcacttcgtagtacagcccaggctgcccatcgaattattactttataggcaagtcaccacaccgacgaactcactactactccttacaacaaggtcacaatccacgagattgtgtagaaaacaaaagtctgaaatatcgccaacaacaggcaaacataagccttcagagttcagagcagccggtgatagcacgccgtgctgagcaaagtcaaaatcgataagagctaaaaaacgctgcaaagctagctcttgaggcctggtttagtaccaaagttttttttcaaactttcaacttttttatcacatcaaaacttttatacacacaaatttctaactttttcatcacatcgtttcaattttaatcaaacttttaattttgacgtgaactaaacacaccctgagtcttgaatttcatgccacacacttgatatcacttaacagtacggccaatcctttaagcatgctcaccagagtcatcatacagtacaagtgtaccgtatttacaagggttccctatttacaatatcttgagctcctgtttggacgtgtttgattgcgcaggcaagcagtaccagtgtacgatagtcctaaaaaaatatagactttcgatagtaatatctcgagctcctgtttgacaagcgaaatgtatcgcattcaccggccggcgcggtggcgccacccggttctctcatctcatgtcacagccggagaccggagtgacgcgcacacgcgaaatgagacaatcctttcttccgtggggcgtatgacatgcaacagaggattttgtctctgcggatggacaggcgctgttgagtcgcgcatgccggccggccggccacacctcttgtactttgcgtccactgcttctgtgtgtgtgctgccttttcacgtcgtacagctgatgctaatggcaacagtgtacagtacaatactccgagtgtaagataaacgtgtgttttgattcttattctgtgataaacaattggtatatgtggttattggttttgatatttggaatttattcacgaagtggttttagagataattgattttcaggtgatgaacagggtttgttgtattgtcgggatcggtcagaccgggcggtggttgccggtcagaccggcgctatgtgagcggcggtcagaccggcttgccctcggtatgaccggccgacgctgtgtcggtttcgggttgtttctttggatatccgtgattgtttcatggctatgtcttctagatggatactatacatatgtaatactattgtttgctaacaatgagtcaagtaggtgatagcttggtctcagaatatggtttctttgtttgttttatgtgtaggtgactcgatgccttgggagagtatttgcggtgatggatcgggagtcggcttggtggtaagacgatgtccgtggtggtcagatatcatgcgcgatacttaggctagagttgatgcacgtggttggtgaagattccatatggcatacgatggaggtattatgtgcgtatgggatgcggagtcgaatttggaaggagtctaaatttggtacgattggttatgtaaagtttctttcttgtactagatggtttcctaaggtgtttaggactcatagtatgagtttggttcatggttttaggctgccaacctcatgtataaatagagggggagggtgaggcttcccggtatcgtttttgagagcaattgagttgctagtttagttagggttttgactttagtcgagatttttgtaaggagtgctgttggtgcactttgtaaacacagagagaagtaataaaggtatcatatactttgagagttcttcgatttgtgtttcatcgggtttcgacggtctaaccggcgactcaccggcggtcagaccggcgacgcaccggcggtcagaccggctagggcgcggcagttgatcaggcaatcagaccggtgttccaatctcggtcataccagtggcttccaagcggtcagaccagcgcatctacttcggtcagaccgagatccatcgatttcgagggtaacttttatttccgctaaaagtttaaatttttgcgtataccaaccattcacccccctctctggttggtttagttctcatgattcgattctacacggagttcttagtcttttgccaatgaaaccagcagaaagaagcgtacgggaaggcaggcccctaggcataaaaacatcgttctccaactggactgaattttaggttggttactggatgaatgtgaatggataggctgaatattctggaagctcgtttcacaccgagtttagcagttgaccattcccacatcacccaatgggggaatttgaagaaaataataatcttgtagtcttgtcctcgtgtggtggtgtggaactacgtttgcggcattaaaaaaaatctatgttggtgagtccacatctagtgtcacaaaataatatttcttggaagaggataagccgacctatataaaaaagtgttacggataaaacagaaaagataatggttaatgttgtaataggaggcaaaaaatcatcccatattcaaccgaaacagtttctcattcgccaaccaaataaacttttacttatggtaaatacttaatgcaaatacaaaatgaccggcgtctcgaaataagcattcaagcctacgacaagagaaaagcactattcaaccagggcggataaaatttgaaggttaagccatcaaatgagaaaaattccctcgaatataccgcggaaatcgctttaaccactattataagttggcactgaaagtttcagggaccaccaaatgtacaattgtactcttagaatttaggggtattgtagtaacttaggcagtgttctttgtcctgggttcccaacccctctccctcgttttccacacgcatgctttttaaattgctaaatggtactttttaaaaaaaaagtttctatgcgaaagttgcttacaaaattaaattaatcacgcgctaatggattgctctattttccgtgcagagaagatgggttcccaacccccattagcaaacacacccttcctgtgtattctttagggtaagattgtaacttcgtatatacattcgaggactatataagctgatcctaattttgcaatggcaaaataccataccacatattgaactttacgtttcgaggtcatcccattctcaggatacgcacaagaaataataccttttcgcctatatttgatatgtccgtggctgaaggtctcgacagtcaacaaatgaagaaatcctaatttctcagtccaaacacgaggcgtttcatcggagctaggcgacagagagagtacgtacacactcggtggcgaaatttccttacgactattatcccctgacgatttctgaagcaaagaagacctgaatggctgaatgtatacagtaacaatgcggttgagtacgctcgcgattgacatgattcgggagatacacactaccttggttttccatatgtttttgctccattcatactagaaacttgggctgtcgtcgttaggacatcaccaatatatatggtaaaagtggtctatagataggaccaatataaataaactttaactatggcaatcctcacaatatactccctccgttttttaatagatgacgccgttgactttttctcacatgtttgaccattcgttttattcaaaaaatttacgtaattataatttattttgttacgagttgttttatcactcatagtcctttaagtgtgatttatatcttatacatttacataaaatttttgaataagacgaatggtcaaacatgtgagaaaaagtcaacggcgtcatctattaaaaaacggaggtagtatatggatacaaggtagtattagaaaaagaaagaagtagatatagataatattatttatttcatataggtcgtccatatgcatataggtattttagttattttttttatatggactagttgtacaatgttactaggtggttgaatggaatagtttattttctatgaaacttttataatacaatgtggatacattgtggatgcaacacaactcattcctgccacgttggttggtttgcttttcagtacacctaccaggtagtacgtatcattcacccaacaaacctgacgcccgtattcggagtctcgtattaactctccgtgttctctctcgtggcgccggtggcacgtcaacgcatccaacaactaataataaccaccccccaagtcgtacgtcgtactcaccggccaccacaggagcacgctggtgctactacacacactgcttagctagtctggtcctcagctcgtctgcgtggaaatgcatacacacactgacacacacaacacatataagtagactactcctacccttcattctcttgtgcatgcgtggtgatgcaggattgcaaggtgcatcgagcaacttgcacgtttgcaccctgcccaagtcgacagattgtccttgcgaaatgcatcatgttccggcataggttaagccggcacggttccaaagtccccaccccacatgggggactcagcgtccatgcatgcatgcgcgctggctctagcagtctagctttagccggacgaggaagcgatatgaagcgggcaacctgcctagcggcatcagccgcatgcggaggctgttacacaagacgacgattcgttgccggattgccggcggcagttcatcgaagcggggcagtgtggttccttccgctgtctcgcgcagcggctctcactcatgacaacggcggcaggcaggatgatgatcttttcctcgtcacggcgcaattgaacgcgacccacactgcttcttcccttgcgtgtcatcagttcatcactcgacttacatcgctagatttttcgtatcagtgttcaaccttttttcgattttcatgctaatcttcttcccctactttcacttgcgaaagggagtactagtatttatgacggcccataccgcgggctgtaacacgatcgttgccactacacagctcaggtcgcatgccaccgccactcgctagtcgctgttttgtcacggctcacgtcacggatgggtcccttctctagcgccgacgtggcaggatagcattgatcccggaagacagtagaccaggcggccccatgcaacgaatttttcccagtgggaatagagaaacacactacagtactagtactacacatccaattactatagtttactattttctccacatactagtactccatatcagttctagcagtagtgcagtactttaaaagcgatcaagaaattacctgacgtagcaggctaatgacagctaaggtaaactgaggtgggtatgaacaggttcactactccttaccaaaggagaaaaacgctaaaaatagaagcttatcaatcgatttgatcacggcaataatgctgcatgcgggctcaccttgtggattaacgccaggcggatgcgacagtgacgacgcggcccatccacccgaccccgagccggccattgtcgagcttcacgtcgaacgccggcagcgcagggccgagccgagccctgacgcggccgccgatgtcctccccgatcgccacggcgcggaaccccgccatgccgaaccgggcgcgccacttgccgaacacctcgcaccgctccacccggtccgggccctcccggcccaccgcgttggccaccttgctcgccagggccgcctcggcccgggttctgtccgcgctgtcccggcccagggtcgcgtccagcgactccagcacggcgccgtagtgcgcgctcgcgtcggagaagcgcgccgccatcggcgccgtgttcgtgttcagctcctgctccaccagggtcacgacccgcgggcccagcgcgcgcacgcgccggagtagctcgtcgcgcgggttcgccggcgacacgctctcgtcgggcacgcgcgacagcgtgaaggcgaggttcacggccagcgcctctcccggctcgcaccctagcttggatgcctcgatctccggtgctcggcagctgactgccctgaagcggaagtctatcccggcttgctgcgcgagcttcttgagccgctcgcatgtggccgcgagcgattgtgtcatcgccggggtgaatggcgaggtgggatccgccacgacggtgaccttgagggaagtggcgggcacgcgccggtcggcgagggctttgatgagggcgacgtgctgcgcggcgctgacgtcgaagtcgacgaggtggatggcacggtggcccgccacggcgtcgaggatggcgaggttggctccgtggagtgcgaggccgaagcatggcgagacgtcttggaggagttggcacgccgcgcggtgctcaccgctgtagaggtccgcgagatgttgagacgggcctgtgccaacgcgggaggatagggcggccaccatcatcgccaccagcctctgctccgcgtcgccgcgcgggttagccgacagcttcagggcagacaggagagaggccgccgccgtgtggttgccatcggcgacggcagcggctgcctcggaaagaagctgccgcgacgaggccgcggagatcggcggcgagctggacgctgacgacgaagccgtggacgaagaggagttcgtcggggaccgcgccaatagcgcggtgctgttcacggcggtcggcaggggaagcgacggcgacgacgcggcggtgacggagttaagcctctggatcgtgtcgccccaatcggagcttgtgataccagagccgcaaccgctccctgccgcgtccgcctcctcgtcgtcgcccagcagctgcttctccagctcttgcaacaagaccagttcggtcgccgttgccggcctagcagcgggcgccctcgccaccgcttgattctgcgcggtcggaacggccatcatccgccgccgctgctgcatccctggcatcaccgtgcgcgacgcggtggtcaacgacgacatcgtcgacgacggctgctgctgcgagataccgccaaaaccagacgacaagccggaaatgccataggccggcgaggaggcggccccaccgagcacagcgccgatatccatgcgctgcctcaccgagcgcaggtacatggcctgctgcgccgccacctgccgctgctgctgccacctctccatctcccccaggctcctcttgagcacgcctccggtgacgcccgcgcctcccgcaccatcagatcgcggctgctgcgattgttgccgcgccgccgcctgcaacgccgccgatccaacaccgtagccgccgtaccctcggcgagggtcgcaccacggcgcacccgccgggtccatggcgagaggaaggccaagaccaaaaacaccacgagacacgagagacgcgagagcaaaggctcaatggaaacgagcgagacacagagaaaggagaaataaaaaggcctttggatggaacgaaccttaccgtggaggaatcctacctacagcggctataaaccgcttgcgccattcaatggcttccccctaataaaacgcctacctttttacggcccaccctgacgttaatatactccccgaataataaaaaagaaaggactgactcgtggatccacacccatacggcagcagtgacgctgacagtttggccccacgtccggtgaatcggtgcgtgggacctgagccttcgctgccgtggatgtggggcccactcctccgctccggtagtgcgcaaatagtacggagtaaatgagaggagagccgggagggcgatcgtgtactccatggcgaaaggtttggatgcgtgtgcaagtgtaaaatccgtaatgacgaggtgagaacttgcgtggtggtgtgattgttgtgtgaagggatgggaaaaaacgggagaggcagggcgcgccaacgcggtgcgtttccaagcgaagcgacgaccacacgatcgcgtgcggcgccgccggctgcgcacgatcgggacgaaacagccggcctagcgtgtttagctgggtgtttttgtggaaacagctcctgattccatggcatggttgaatccctgatttttctgacgagtcatgtggagtctgaatccgttggtgcggggactcgcggttgaagagagagaaacttctctacaactgtacttcacctgccgccacagattcgtacatgcttacgttttttgataccggggtatcttgcggagataaccaagtaaccaccacaactttttattagcggtaaacacatcgctagggtgtttactccagttcagaaccgccttgagggtcttttcatgtgttctcagttcgcagggacaactttactttaggaatctgtccacgttgctttgctccgcatgattacatagcttaaaaaaacctttgcaatttggcatatttcagggtgccaaggcgattgttggttgcctttcttgatcatattaaatgctactcccactttcatagttggggatactacaactacttgctcgcgcggccacgatccattcctcgggccacacgagaaatccatgtgacatccacgacagcgatggccctcgtatactagatgacgagcaggtagtacgtgatagaggacgactatactaaaaggtcattgcattgagtcagtgcacaacagcattctttcgtttaaattttgttcttttatctaagaaggcagtgtttatgaaggttgtttttatgtgaagatatttggagttagctaagaaactggtgggtaaagccggttcacccaactactagaacgttaccggctttctgcttacgcaccttttccatatcctaacacatattagtgagatctcatcttttctatatcctaacccatattttatggccttgtttagttccaatttttttcttcaaactttcaacttttccatcacatcaaaattttcatacacatataaacttccaacttttccgtcacaccatttcaatttcaatcaaacttccaattttaacgtgaactaaacacacaaaaagtgcctatgaaggttgttttggcagtgttttatgaaggttgtttttataatagaaccaatatatagtaccaaaaagtgcctcacaaaaatataatacgggtaatatccgtataattatccgggtaatacccggattatttaccggataatccgtatccgtcggatactacgttcccgaacctgatctcgtatccgccaaaaaagactcgtatttggacccgatatccatgaaaagtcccaggtacccgaattttcgaccggaatttgtcccgaaataatgtggtcaagcgggcgggcgggaaatacccaccccattttcactcctacacctgcataaccacgaccgactatttcttctgcgtgagtgcacattttaaggatatgcccactctaaggtcctatttgaaatgaattaaggattaccatatgaattttagaggatttaatttcctaggaaaatttcctaaaaacctttgttcatagggaagaataagaatatttttcatagtattacgttcttatggtttaattttatagataaaataagcaaagagatctaatctcttgataattttcctttattttgtctgtttaataaaagtttcgacttcgttcttttctgtgcttaacatttctatataattagacaaacatggcatttggatttctatcttttttatatcttacaattcaaaatatggcaggacataaacgacaggcaaacgacaatgaataagtcgggttgactattgaccagaaattagtaaattttatataactacatatacttggattaaattagcacaaaactacatatgtaagataggttatcataaaaataaaattagatgaaaaatttatcacgaacctacatgtttagtgccaattaaatcacaaaactataatgttcttaggtccaacataatggtagtgctagggatttaaattttagaataagtagttttgtgataactttaatattaaatctgtagtttagtgctattaagccttaatctatagttttgtcataaatttaccattgatctatagttttatgaaataatactttaaatctatagttttatgaaacaataccttaaatctatagttttacaattgtttagttaaaatgcctctaatttagtgaaatgtgctcataagaaaatggtcgtatgccactactaaaagtttggttagtccatatttaattgttaggggacccataactcatatataaattacacatgcaaggacaactattggaggcacaatttttatgctgctatatagaaaattcagaggaacattagtaagtagttagttgcttggaatatagaaaattggggtttcacgatttctaacttctagttttttaaaaaaattctattgctataaatttttagaatttggatgagaatccggattgtctgaggggagctgcaggcactataatctcctcaaacaagagcctaatcccctaccttaagagacacagaaagaggttaagagagatccatctattcactaggtgacagatatttcttatccactactacctctgttctataataattgacgttttagacaaggttaatgtcaaatttttataactttgactatcaataactttaaaaatatttagtttaaagaaactagaacaacatgtatagatttgtctttcaaagcactataataaaaataaacatgtatttatttattgtgtatattataataaaaaaataaggtcaaagatatattttgtagaccgtgtcattgtccaaaatgtcaataaaaatgaaaccggagggagtaatcactttttaaccactaaaccaacaataattagaagttcattatgtaaggagtaaatttcagaaaactgtaacttgagtgacagaactatcagtttactgcaacattagcgacatgtttcagtttgctgcaacaatagcgtaagaaattatcataaaaccgcaactttaacactatatgctgctacagttgtcacctgtatgtactgtagcagtatataacgtaaaagttgtagttttatgataatttcccacactattattgcagcaaactgaaacatgtcgctaatgttgtagtatactgatagttttatcactaaagttgtagtttttctaaaatttactcttatgtaagcataaataaatagttttcaaaaataaattctagagtatcatagtttagcctgagcacgtatgcatgggaagctaccctgttcgtttcatattataaatttttttataacttgtttaagcttgacaatatttatagaaaaatgtacctatgccttgaataccaaattagtttcgttaaatctagtcttgaacattttttattgtggtaaaaagtctttgggatttcatgtgagtgtagtgtggctctgcccccttcctgctgatcggagttgcatttagccgtcgtagtaaaattttctccttttccttgctgcaacttttgttttgtttttttctcccttccctggcataaaccggtcttgcttattacgttgtgtaacaaaaattctttttcttctaatatattgacgtgcaatctttttacgttcgcgaaaaatgtgttaaacagtccttttataaacttaattgaagttaaaagaagtttaattaaaaagagttagtcgaagtttattttagaggactgtcaaaccaatcacgtcctataattaaaacgtgctctctggtcaagtggtcccagtatttctcatacaatgattttcgtagcattaaataatatatcacatagattaaaacttgatatgtcaacctattagatgagaaaagagaataaagcaaggtagcaagatactactactaaacatgagttaaatagtactatctcaggcacataataattgtattttttatttaattttgtctcaaaataattatcacaatagtgtactaattatctcaacaatcacttatcattctaatttctttctctcactcagcaattcttatctatacaccatttggtctttcttctaaaatcttaatatatgctaaataattactctctcacttttatctatacacaatttaatgagggacatcattttttttttcttttaaaatcttattatatagtaaataatttagaattataactattttgggacaaatgtagtaatccacagtatgggataagtagtggtcctaattagcttgggaaacaatagttgcagaaaatccaacagacaaacatccgaacaaatccgaatgtttcgaacgaaattgcttccccaaggcaaccaacaaggcctcagccaactgccaacaagttcattgtagccaaaacaacattcgtgggcccatacttccctcctgggaacccacactcccggaagctttgccgagtactctctccggccaagaaaagaaaaaaaagataatatctgagaatgaatctggacaaatattttatctagatttatttctagaaattagttttttatggaacgaagggtgtagagcggtcaacactaccccactgtgccaccggcctggtcggtcccacctagtattagttcacattctccctgggacccacccggtgacaggccggctgcctggtcagggttgttatccgttggcctattattaatatgtactccatctattttatttttaaatcatttgattttctttataatcaataattttaagtttaactatatttataaaaatatagtaatatttttaatagaaaataaacatattatttatttaaggatatatttaatgaaactaatttgaggtcgaagatgttattaaatctttatataaacttggtcaaatctaaataagtttgaatgaaaaaaattcaaaacaacttataatattataatatggtgggagtatatgtgtatttagatattaaaaaattaatgcgagatgtaaattacgacgggagaagttataatcaactttaaatttaaaaatatttaatttttaaattctatcagtggattgtaaattataagacaaatggtgggagcatttactctagttgcacccgggtgttaggactattttggtttggtgtcaaatcttatcctacacgaaatagtacttgtttgattgggttgattttaaaacttgccaaacaatagaaatctccaccaatacattggtagcatcaaaacttgtttagctatcggaagaactatatatttaagatgtttttatcacaaaactatatagttagcgactaatttatcaaatgaagtattgaggcaaagtatcgtaaaattacacattttataaagaagtagaagttatcacaaaatcgaggaacttgccccatccatgttcggtcctaatgacttcatcgttctcctataggcgcttacccggtgtttttaacgatttcttgctttaaaaagggaccgtccacgggttactaaaatgctacatttcttccatgtgtatcatctaaatgatacgtatcgttcaaaatttctcatgtttattacaaaatttatttatacctttattatttttgcactcgagtggagctcccacgctaattagaaaaatctagttgttgattagatagttcgtattatcgtaattgtagatcatattgataactcacgttagatacaatatgcaattgtaaatattatgaactcttcagttttcctatatttaataattgtaaagtataataaatattaatccatatcactctagatttagtgttttattaatttatttctgaaaggaaaaagtaagaattacctccacaaactatcgcggtcgtccgaattacccccctgaacaacaaaaccgaacattctttacccccaactatgcaaaccggacgaattaccctcctcgacccaatccacggtggttttggtctacgtagcgtacgcgtggcagtccagtcagcattttatttaataaaaaacgtgggacccacctgtcatactttcttcccctctctctattctctctttcgcacagcgcgcacggcgaggacggggccacgggcggtgggcgcgggcggtcggcgaggacggcgcggggacgggtggtcggcgaggacggcgcggacagcgtggacgttggcgcggagacggagtcggaggtggtggaggagcgtggcggcggtgaggtgaggacgacagcggccggcgacggaggcggaggacgaccgggcgagcgggcaagcgctgtgggcggcgggctcctccttctcgtcgtaggagcgcaggggccgcggctcctcctccgagcctgttgatgtgaaaacacgaggcctgagagatctgcttaactccagtgcaggtccaaaagcttgcctttaagtgtgtgagcatgccagttgatttgatcctgcaatcaacaagaaataaaaacaaagagaacgcggttaaatccataaacgatagctgatcggctagttgccgatgacgtatcatttatctctgagccgatgtcatatgtgaatcgatcggcaatcatgaatgaacaagaaagaactaaatctacccgatcagctgtagatattaacgatatataatctttatgtcgatatatacttgaatcaagtgattgggatagatcggtcgccatgtcgagacagtataaatcacttatcgaaatatatattaacaacaagactatatatgttcatagcatagccgatcagatagatctagcatgtaccggctaatactccgatattactctatattaagatattaaagcaagtagaatatactaaacaaaagcctactatacttgaatgcaacaagatcttaatataaaaggcatacttaacatgtcaatcaagcatataaaataaaagtagttaaatcagataaaatcggctgaaaccccgatgctaccctaatcggcaaccaaaagcaggctagatattgagattctaatcacgacttataaggtcaaactcaactgatgcagctataagtatgaaaagaaggacaatatctagacaatcaagccgttggatgtttcatagagtggtggatattctatataatttaagtcaacattggtatttaacctaatcggctgccttatagcgacagatgttagccgactggaggttagataacaatattgccaaagattatatagaatatatgataactcgacgaattacataagcaagattagagtatcataaagatggaagcactaatcccgagaacgcaagccgccataacaagttttacctctagttgaagatcgaaaccaatgcagctctacccgaaagcaagaactcgtcgaaacaaaacaaaagtaaaaggatggcgatgcaccgagattgtattgaacgtgtgttgttgtattacatggggttcggggtctatttataaccgagattacaaaatatgtccatatcggacacgactcttatctctaacaaactctaagataccataagtctttgtggcagacttttgcccaaatatatctctaagaaaattacataaaatatcctaattaatagatacaattgccttctcaggactctatccatgcatggcaatcctcatgaagcacattaactcaacccgacaacgcgtaccacgtcatattgtcggtatcggcttgatcggctaaccttgtccaactcggactctgccgatcctggtctcagccgattcggactttagccgatccttgctatatttccggaacgatttccatcttgaattccgctttgatcttatcttcatctccgatactcagattaccaaatttggttgttaatagagccgtcgcgccgcgcctcgttccccgtctgtcgcacgttatcctcgtccaccggcgatgcgccgccgccagcacagcgaaccgggcccaagggcgggaggaagagcgcgacggatgtggacctcgttcgtgcaggcggcaaggcggagcagcctccccggcatcaacgtcgagccttgcttccgccgtatgccgccacctccggccttggctcctcgccgcgcttgcccgccgctcgctgccacctccgcccccgcctgtcgccagcctcacgcccacccgccacccgctgccttctccacccccgcctgtcgccggcctcgactcctcgaccgccacccgcccgtggtcgcctccgcacccaccagctgcctcatgtgtggctgtgtccagagagagggggggtaaaggaagagagagaggaagagtatgacatgtgggtcccccgctgctccgtgtcccccgctgctgccaacccacctgtgagagagagagagagataaaggaagagtgagacagattgagagagagaagagagaggaagagtatgacatgtgggtcccactttttttttttataaatagaatgctgactggactgccacgcgtacacacgtagataaaaaccaccgtggattgagccgaggagggtaattcgtccggtttacatagttggggtgaagaatgtccggtcttgtggttcagggggtaattcggacgaccgcgctagttcgggggtagttcgtacttttttcttttgtgatatagtaattagcaagttgtactagatttttttataatttaactgagtgttataaaaaaaacacctaacatatttacggcatgattaaaccttttaaagtacaaatatataagcctgtgcagcacatgggtgggcgaccgatgacatcctaattctcgtgattttctaatttccttgtgccgctcttaatttcaactctggtatactcaatttaacttgttcccctcaagttatttatttcgtgaaaaaaatacgacggattttttttctctcgctgtactgccccggtgcccgacggcggctgtatgtggaaaatgtcgctttgatcttgtgattggtgagttccattaggccttctaatttttttttcaaaacatcacatcaaatctttgacacatgcatagagcattaaatatagataaaataaaaaactaattgcacaatttgaatgaaaatcacaatacgaatcttttgagaccaattagttcatgattagtcataagtgctgcagtaaaccacatgtgctaatgatggattaattagacttaataaattcgtctcgtgattttcaggcgagctattaaattagttttttcattcgtgtccgaaaatttcatcagacatccaatcaaatgtctgatgtgacacctaaagattttcttttcgcgaactaaacaaacttagcatatttccactgttcatctattgttgatacttttgtttcgtttcggtgttcctctttttggttctgagaacaacgtccgcagcatcacacgtccacctgtgacctgtccacgggttgacgaaacagagcaaagaatctctcgcttcgctggcatgcaagtatgcgacctgtggcccgcgcgcgcgtggtacaagaccctcccaggtgtgcgatatcacgtggacaagtgctcgcttagacgctgaccccaacagctgaagaagtcagaagcaacgcgcagaggctcctccatgcgtttggctccctctcgttctgtcgagcggtgttaaccgggcgctgccaatggatctgatcgctccgcttacgtttgaggcggccaccggctaacccgaacgaagcggaagctagctcaggaacagcaagcagattacgaaattaaaacgagccgtgttgtacgtacggaggatggcgatggtagcaactagcaacggtgcgtaacctggcgtcgtggcgcgatgtgagcctgtcgctccatagctctccactcatgtatgccaacgcctccgagccggaaacgcacgttgatggcatccgtgatccgtccagtcgtccactcgcgagcgagcctttcagctacgtgtcacgttctccttctggcattcccgttccgagtatggccttatatacgggaacattttgcacatggtgaggaacaaaagaagggcacggagaaaagttcggataaagatataccatctcttgtaccttttcttttcggatttggatttgacatggaccgcagaccaaaacgaacatcgaaacgattacttcagatgttgcaatcgacatggaaacgaagtagagaccgacaggggtagaacgagaatcgaccatacatggaggcatttgaggagaaaaagagaaggtagcatcacgtactgcagccaaactgtcagctctcgcatctgcaagcggcacacggcagcaacagcacacaacgctagtaggccaaaagccttcaacgcgagccgcagccgacagatgatccaacggtggatggatagacgggccatcccgccggccgagaaagagaaggcccaatatagttattctcgtgcaacatactcaggatcggaataagttcacaataggtcctttaacctgagagcgagttcgattttaatccttaaaccacaataccagatacaacgggtacttcaactatcaaaaccaatgtaatataagtcccatgacggtttcagctgacatagcatctacgtgactaatttgactcgatcttcatctaacgtgacattgatgtggcacatgaagcgaaatttaacaatttaaaaaataaaacaaaatatgtgggtccacatgtcagtcaaataataagatttaaaaatagtgggacccacatatcagtagaccccacttcctccacctcatcctctcccttctctatctcctcccctcctccattcttcctcttcttcctcatatttagccggcacgactgtggtggttgtatgtggtggtcggcggtggctgttgtgtgggcgagcactgctcgccgccactgagcccgtgggcgtcacggtccgccggcaagcgtgcacataaagggaggagcgcggggaggacggcgagctgggcagcgtgtggacatgcaacggaacgtgtcgaggcaatactcattcgtcgtctcatggcgacgggtagtgctcacccacacaacagccaccggcggccatgaccaccaccaggcacaaccatgccgaccgaatctgggaaagaaaggggaagatgggagaaggagaatgggaggagaggagatagagaagagaaaggatgaggggaggaagtggggcccactgacatgtaggtcacattattttttaatcttattatttaattgccatgtgggcgcctatgttaaattttgcttcatttttaaatcgttaaattttgcttcatgtgccacgtcaatgtcacgtcagatgaaactgagtcaaattagccacgtaggcgttacgtcagctgaaaccgccatgagacctatattgcaccggttgtgatagttcagggacccgttgtatatagttatgtggatcaaggatgagaatcaaactcaatgtcaagttaagggagctaaagtgaacttgttccctcatgatgtgataacttcaaggccccgtcaaaagctggctcacattgatcgatgttgcgaggaaattgcagtaactggtctcctggcccaaacagtaaccatgccaattccggcaaagcacagcttttagtcgaaatagttctctcgattcaacgcatttccttccacgaactgtgcctccagcaaaagcaatcggttgtgtgatgtgtgacccaacgagcaatcaccgagctagcccagcgcacacatgaaactcgtcatggaacaccacagaaaaaaaacagtacgtgtgttcagtgatcgcattcatctacgaacagtgtcattattattgcgggatctgccgatctgaagttggcgactggcggggttgatggcttggcgttgatggcacgcgcccccggaaggatgaccaccctatatgtgttgtacgacatcacttgaccactgataattttttttaagcgaaccacagctcaatttgttttactcaattatagttattttttttaagttttagcaagtttataaaataaaattagtaacatttttaacacaaaacaaatataatgttaaaataaatttggtgctggattcaataaaactagtttggttttgtaggtgttattatttttctacacttagttaaacttaaattgatgattagaacaaaaccgaaaatgatttctggtgtggaacaaagggaatactgtgatgtgtggtaacctaattttgacaagccaactcaacactttagatggtatagtgcttttgaaaataattgggacatatatagggacagacttttcttagattttcctgcagaaaaggagattttcttagatttggattgatcccttgcaaagggataagatatgcatggctatgatgcgatggtagattaatctgacggctcttagtggcagctgtaggactaggatttagtggttaatggtaaactaacgaacttcaatttacatgtggttacaaattgtctctaattgagataagtaactagctaggtgacatgtaaggtaaattgttggtaatagcatttccagcagtctcctaatattccatctctataaacaggttattgggatgtcccaatactactataataagaaattttagcgatgtgcttttatagctccctaatatcatatccctaatattaatgggtcccatgtgacacacgcacacgagatagagagacctctgatagcatggtaagctttgagtggcggcggtcgtaagagctcaaggcggtagatgaactcgggtggagctctagggtagatttttggcaagtaccgagcagcacgcctgtcgtggacaatggtcatcgggggccgagcaacgcctccaggcgatcctcatggtgtcttcgatggccggctgagctagcgttggcggttaggtgtagcggaggatcaactatggtattgggggaattgcaactcccccttcattcggaaggagttggggtgattcattggtatatattttttggatatgggaaaatagaaaactgctggtgcacccacattttcaatatgaatatatatatatatatctggacatatatctgtacatgctgatacatagccagggtttgcctttttttgggatggagggagtgtatatataaaatatatatatgagatatctgggaagtgggaacggatgaatatgctcttactttaataaaaggttttttttttcttggtcatgggtcaaacctgcttcctctatttaccaaagagtttattttaagttttatgctacaaagtgtttatttggagtccacaaatttgtccacgaagagtttattattaacatttctccagtaataaatgagtggcacataagtcatttctccgaagtatcaaactgcctgagaatcacttaattaaaagaacttttcgtagtacgagggagtactaacaaatgggagaaaattgtataaagaacaagtactcaatcgttcactaggacaaggctaagctacaagtctacaacactacttcacgttgaaaattatctgtattcgtaaaatcttgttcgtgaaagaagggcaagaactgccgctgctctgggttcccggttttaagggttcagtactctgatatacatgacgagaccacctagcacaccttttgtaatctaaagcgcaaggaaatatataatatccttgcaaaaacaaaaagagaaaagatcaggatagctggagagcaataatgtactccctcccttttagattataagttatttttgactttggctaaattcaaattgctctaaggccctgtttagttccaaagtttttttttccaaatttctaactttccatcacattaaacctttaatacacacaacttttcagtcacatcgttccaatttcaaccaaacttccaaacttcagtgtgaactaaacacaacctaagtttgatcaagtttataaaagaaaaaatagtaacatttttaacccaagacaaacatataaagaaaatatattcagttatagatttaatgaaactaatttattgtaaatgttactatatttgtctacaaactttatcaaagttgaagttgtttgactttgaccaaattcaaaacgaattataatctgaaatggagagactagtatatagatcgaggcatgtatacggatatactatctacgtatcgctatccagtattctagtgccatgactttacctcaatcaaatcaagactttctttacggagtgtagctggtcggcatcgatctgcatagctagctaggagtacttaacacaaagggacctggtatgcgtatatatctacagcctatactgctatatacagtctatagaaagtcacagcctgaggagaatatatcacgtacacctgccatgttgcgcaaaacctgccctgaaaatgtgggatttggcccttcccgtcacatacgtacctcagctagccaaccagctggtacgtatgagtacatgcgctagctgccagtagagctagctgcatgaacatcttccactaccaaaagcaaggatgcttatgtccatgatgaccctgcaagtaagtcacctgtacgtgtaacacctatcctgaggtccatacgacgtactacctctgtcccataaaaaataaatttctaaagaattaaggacatactaggaggataggcaaatgactacaataaccttatttaataaatacaatacatgcacatattccatatataaacttgattaaaagaaatgttgagataatgggttagagatgggatagaaggaaggaagattacaagaaaatgtaattagtttactgggtcccatattagtagaaatacaatttttatggtacagaagttaaaaggtagaaattcaatttttatgagacggaggtggtatgtatatacgagacatacggataggacgaccaacttaaattgcctctggggctcaaggccagttcgatctacagattaaattgccccagcttgctagatcttgcatgtataatcgccgatcattttggatactttttatctgataacaccatcagacgatcgacgctgtgagatgtcactactacacccagcaaattaatggcaaccgatcgttgggcgatctctccctctctctctctctgcgatctagcctttcccagtttgtgcaacgatctaatgtctgatctctccttccctccgtggcgtagccaccacaaagcttttcttgctagcatggccggcaatggaaacgtacgactggagcatgctctccctgcgtttcgagaaggaatattgacactttcggggtggtgatcgaacctgtgccgtgggtcggtttgtgtatggtggcgtggcgtggctagccagccaagccggcccagtcagtggtggatgtgtgagtgatgcaggggagatctaagcgaaagatatgcgccgcattgatgccacaggggagggagggctacttgagtagttgagtgtttttcccgttctggcgctggagggaatcgtccgtcgcggccagccagatcgaacgcgctttaattcccttgcctatgtacatcaactgtactacgcgcggacgggcgcgcggcgcggcgcgggccggacgtgacaggagtcaggaggagactgaggcgccggcgcggcggggcggagctagtatagctaggttagcgcgcgggcgcgcggcgtacgatggatcggcgaggaaaacccggggtacgtacggcgcgttcgctcgctcgccggccgtctctcgctcgcgcgaggcgatgcgtaatgcgttgttgcaacccccccgcgcgtgcggggaccccgaggtgaatgcgcgccaacgacacagcgtgcatgcatagcatcctcgcactcgccagcgctctccccgtccatcgatccggagatgccggagctggccattgattgagggcgaggagagaggagagagacggacggatcggccggcgagcaaaggacaaggaggaaaccgacggcttcagtttgatggtttccagcgacatgaaggcgggccacaggacgggcgacacgtagctctctggctgcttgtcagtggctccttacctaggatgttcagtgtcttccataggataggtcatctcaggccagctctcccccccccccctctctccctctctctctctctctctcctctctgaaagagcctgttcgatcacatgcatgttctacaacaaagaatgaaaaagacctgcatacaacttgtaaatcactgaaaacctgagttgatgagtaccatatgagctatagtccaataaagtagagcttgcgaaaaatgcctatcattgtacacaagtaatataatagtggtttgcattttttgaattaatgtacctcgccattataaaaaaaagctacccggacaagaataattaaggacggagagtgaacttgttgagaattgagcgggacctacatctgggttaaaaccatacacacctacaactacacacttgaaagtgcatctcaaataatcaaaaataaagtgtgggcatgtcaaaaatcgaacataggtccacagggttaaaccatatatacatccccatcactacgctaacaatcagaataaaattttaatgaaaaatctcggtcacaagttcttttgctagggagaatgtacacgtataaaagttttcttaaaaatgttttaaaacactagttaaaaataattttaacttgacaagttcaatcttgttggtgcacactgtaacatgacgagagaatctcttatatgccactgaaaattggctatgtccttatatgtcattggaccaaatttgcgcactctcttatgccactctcgtctgttgtctgtgggttgactgttaactctcaagtaaaaaagacgtatttgcctttctgagtataggacatgcctaacaactcaagaagggcaaatgtgtcttttttactttagagttaacggtcaacacagtcaactgatggaagttgcatgatagggtgcgcaattttggaccaatggcatataggggatgaaccaattttcagtggtatataagggatcagactgattttcagtggtatataaaggattctatctaacatgatggtagctcgggtaatgttaataaatgttctaactacaagttagaatgttttaagttgtggattttccatggtttatctagtcgtgacattgcaaagtcttatatataatgggcatgctaacaaatcatcatatgttgtttcagttaactgattatagacgatatggatagttaatttggatatcatttgcagtgtaattcatttaaactttctctccggtgctgttgtaaaaaaaatgaattgtctggagagagatgataaaaaagaaattaacggaaagaaaatgaatattatttttatgagagatttaatgatccttgttgccaagagctataccgttctttctagcaaattttgctaaagtacatcatcattgtgtggttaattttagttagcacctcacaatatatttaacttttggagggagactttgagatgtagtaattgatttcatggtagagatcgccctccccattattttatatttttttgaatggatgagggcgcagaaggcacatgtgcaaatgaaaagacagaaatgcacctggggtatccagttcatcggggcggtgtcgtcccccaagtgatgagcacggtagcatacgcataccacgctccattgttggtaccacgctacccatatccccgtgtctaccgacttatcctcctagcttgaccaccaccctgatcgcattctcgtctctgccggtaggatctggcacagtggatcatagtgacagtgtgctcatggggctacttgaggaagccaacggctcccctgcaatgatgtgttgacgacctcggacgaccattgctgctagaggtggtgcgaactcttatccaactggtggagattgaaagaaggtggccattggccggcagaggatgtctggcctcctgttaattgcctccaccatgaccagtgggtggcttaaaggatgtcaaaggttgggacggtttctaggacgatggtgtgatgtgggaacacgaagaaaacatgaggaaaaaatattaaaatgaatttcccacttaaaatgcatcaaataaaaaaaataaagaaacgaccgggaatagacacaggatttgtgaactagctagggcaaacatcatatggtcccttgctgatgcacaagtacattgagatgtcatttcaattctgtgcatcatatgcatgtggtcccttgctgaatattactcttgaaatatctaccagtgccaatctattgcatgacttaattaattcacaggttttgttgattacattattagtaagcttgagagcacaagctcaatggatttttctataaatggggatcattttgcaattttctttgtcgtgcaaagttagccttctttattactacttctgtttttaaatatacgatcctattgacttttggtcatatatttaaccatgtatcttatttagatagtttgcgcaaatatatataccttcaatgataaaattagttacaatgaaacaaatgatatttacgcaattctttttactaaacaagtcacaagaagtacctgcagcaatatatgttggaaccgtgcagtagatcgagcctagctacgcaaaaaaacaaaaagagaaaaaaagggaaaggaaaaacattaatcatgcatgagcagtatgcccggcaactggaatttgtcaaagatatggggagaggagaataatacaagtactactactacctagctctaccatgcatatgcacccaaaggcaaactggattattggataaagcacagatgctggcaaaacaatccttaagcctcccctccctgcttctttatttttgggcagcctctaccggacggtgccgtggtccattggaccagtaggtggcgacatacatggtttgggttaagtctaggagagcagtgtgtgtgcgcgcgcaagagagagagactgtgagtctgggagtagccctctcccctcctttggccatcttcctcgtgtatatgcatatatgcatcatcgcaacggtgtatatttgtggtgtggcgggtgtggcattggattgcccccattttggctcgtgcttcccagttagggtaaaacctgtggtaaacttgctagccccacgccaaagttacccttctttattgttgaaagggagaggaggtgtgtgaattgtgatggagggagagagagagagatagaaagagagatgtgtgtcaaagcaagcaagaaaccagtttcacaaagagctactactagtactagtgtactactgtggtacagtgcccaatgtcctttctccggactcgactccactaatattctcctcttctcgcgcggctcgttatattctcgtcatcattggaggctttagcaagcaagaagagaggcagtggtggtggtggtggaggaggagctagctagcctgtgcttgctgatcggtgctgagctgaggaatcgttcgatcgatcgggcgagatggggaggggaagagttgagctgaagcgcatcgagaacaagatcaacaggcaggtcaccttctccaagcgccgcaacggcctcctcaagaaggcctacgagctgtccgttctctgcgacgccgaggtcgcgctcatcatcttctccagccgcggcaagctctacgagttcggcagcgccgggtataattaatacagacacaacaacacacacaaccaacaaaccagcatcaatttgaacctgcagatctgctgttttctctgatcaattgcttctttttttttgttcttttttgtttcttttatctgctgcaacggcgtcctgctcctctggggtttctcgttttctttttcatttatttttagcaggtgccaagtagccgagctactatacttacctggccatgttaattattttattccgtctgtctgtgtgtgtctgtgcatactactatagggacatggcgcggtgttcttataaaccgggaggccggatccctaactagcatgggaggatatcttttcagcggatctatacaaaccctactcctgctgacctctttcttccagtttctccgggtcttccttggattattattgcccatcttccgggttgtgcgtgtgtcagagacagctcgaacgataaatttctcaaaaccagtactagagagggtgtgttgtgtgtgagaactgagtggagagttagcatgaaggctgcaaactagaaaggaaggtatgttctttcctttttgatccatcaggggagccccttctggtattaagatctttccggcacattgattttcatactttgtgatgaccctggaagaatcggcgtagcagcgtagcaccgctccattttggtcttaccctcacctccccatgctatgaactgatcaatttcattgttcttcatcacccttctcctagctttccacttccttcggatctcatgccatgtttctcagcatgaatcaaatttaattcgtgttttctacttccatatatactggaagaaatttaattagatctatttttgctcgggaggtcttcatactttgagttctgatgccatcaccttatttcccccccccccttctcttgttctatcttcttcctcatcttggcttgatcattttgatctgtcagttatagcatgatgcattctcaatttgactgtatgtaagttcaaccggaaatatgttgaatggattttctatatatcaacacttgatgtcaggcctgcatctgtttcgcttgtggtggtgtggccaaaattgtctatatttgatctttgctcttctttctcctcatttcatgacgattcctactacggcttaaaccattctttattctttactaatcatggatgttgcttgactcctagttgtttcgtactagctcaacttggagatcttttcattatttgcctagttggtgggtacgtttgtgacagatctaaaatggtgcacgaaaagttttacttattatgaaaaaagggagcttaacagggtaatttctctatttattcgtgatgacattttttccttgataagggggattttttataatctgcactcacatgtttatatgtaaaatctagctcttttgttttgtttttggcatatttcccgctaagtatagagtttatgtggataacattataacttttcaagatccaatccacatctttgattgtgaaaatcatacaatagggaaaatcaactgaagggttaattagatgctatatgcatatatatatatatgtgcgcgcgcgcgcgcctgaatttaactatgtatgcatccaactgtttcattgaaaaagatttgatatttttcagtctattctttttcgagtatatatttaatatgtttcaatctgttttgaccattataagataaagcctatattcaccaggcatttgagatgatcttttcatgcatgaaaaagctgttgttatcacttcaactaaccagacgatctaacatgtatttgtataagaaacagaccttgatttccttctgtaaaatcatgcatgtgttcgttttgaattggagtcggcgcgcctgtgttttgaccgtcaggaaagtcttttttttccctgaatagtcaagggtctatacttcttgaagcaattgggacactaatcaattattgtttatacctcggaccatcttttccttcttcacaccactaatcagtttatgccttggaccattaattgtgttgttcacaagcttcttgtttatggtttacaaagcattcgcctagatttgtgtgtgtctctacacatcgatcacttttaaatacttgtcgctttcagttattcttttaacgtttggttatttatcttatttaaaaaaattatcgtattattatttattttgtttgtgatttactttattatcaaaagtatttcaaatatgacttatctttttttataagtgcactaatttttcaaataagatgaatggtcaaatgttacaagaaaaagttaaagcaaccactaatttagggcggaggtagtaaaacctagttattgtaaccaataattttatcaatctataaatgcaacacaaagtcacttcgtgatatctcacacaaagccacttcaacgatgaaagctgactgcatgttttatcaaaacacatgtgatcagtttgttggatgaaaaaaattatctatgtcataaatcaagagttataatataagcttctggctctacaagtaacatttctatgttttttttttacgttcttacatactatgttttgccaaaaaaaacatgatcattttgttggacgaaaagaaatagtaaatatagagtgacctttgatatcattataatataagcttctgcctctataaataacatctatgcactttttacgtcgtagtaatttgatatatgagaaatttacatataacatttttgtgcagcataacaaagactttagaaaggtaccaacattgttgctacaatgctcaagattccaacaatgcactttctgaaacccaggtatatatatctgcatgaactggtcatgaatttctgctgttggttttggtttcaaaatgggtcttgtttttttactatatatatttttgtatgaatatgcaattatcaatgtcctgacattgaaattagctacagtataaacctagctaggtattttcatcgtattgtgagattacattcaataaaaagtacacagattagcataactgtgttaatttgatgatgtatcccaaagctaatttgcagtgacttaaaatattttacttgacacagctactaaatcggatgttcttttcgtaaaagcattctaaagaatggcaaagtttagaagaattaaactagtagaatttcaacaccggcatgcattaaccatattttatgtaataaatgaagtttttattgacatgtcaaaggaggacaacaaagacaatcccttcttcctatatagttggtacccactacaagcattaacactataaagaagcatccaggttaagccacatcatcgataatcaatagccgtcggatcaaatgcatctttgtttgtttaactgtgcatgccttaagtaaggaaactgccatgggtaattaggcacatcaatggatgacccacttaagtgctcctggtcatgcattacatgcatcccccatattaagccactgctatatcccttaaccatctaccactcaaatgccaactttacactttattattttagaatgtttacttttgatatttcaattcttcaattctgtttgtaagcacatatttacaaagttgtttatcatcaccataaaatcccgtagcaacgcgcggggtatcaaactagttgtttgttataattataccatattacaatgcaagatcgtgctgtttacggcgtatatgtattcagaaatgttgcacctagtataggtttttaccagcatagaatatacaaatagctagtctaaatgactttttgtgcccctagctccctagtgtaaccttacatgaagtattccctgcatcgaatatgaagtatatattccctgcatcgacgaatatacaaatatactcctagctaggctaaaatacagccaccagtatgaagtaaattagtcgatgtagttcaatatttaaatatagatggtgattgaatgtacaacaatagtgcacatcccaaaaaaataagggtgtacctctgtgaccagatagtactccctcagtcagggtacgtccagattcattggactaggatatgtcacatccagtactagggccctgtttagattccaatttttttttcaaacttttaacttttccgtcacatcgaactttcctacatacaaacttccaacttttccgtcacatcgttccaatatcttcaaacttccaattttggcgtggaactaaacacagcctaggttggtttttcgtgggacggagggagtactctttatggtgattctaaatttcagtcaatcaattagagtacgtcctcataacatttcaaacaaaaacatagatgcccttgtgcataatttcaaaagtcatgagatcaaattgaaattcttgagaacttaccaaccgcaaaatatctaaggagttatgtcacttggttatatttatatcattgacatcctgcaacttatttgcccaataatcagtatatatagtttgctagctgtatcattaatagcatgtttcacaaaattttaaaaaaagaataagcccaacgtatatgtacaaggaggccatgtgacatatttagttaaaattcacaaacgacttttatcaagtgtttaaagaaaccgcagaaagttaatttgctctgtgtaacactaatattcagtgtatgattcgccaaacacacagttccttagtcgttagaactagctgataaatatttttgtgaactgaactaatggtttttcttttcctctgatcctgaagagttggtaccatgaaatgtcaaagttgaaagcaaaatttgaagctttgcagcgcactcaaaggtatttcactatgatctctccaagaagcataactcctgcaaatacacaatatatttttctataacatgcatgcaagtgataatgttgtgttaagggaaagagggaagaagcagcccataacgtgcatttacacacattattctgtaatatagctgctgcgaaactttatgtgtcatgcaatttaccttaatatttacattatgctctttgggttttgcttgattcttaaaggcacttgcttggggaggatcttggaccactcagcgtcaaagaattgcagcagctggagaaacagcttgaatgtgcactatcacaggcgagacagagaaaggtttatggcattctgcagtcctttgtttggaaccaaaatacttctgtttctagcctaccctggttcgcttgttatttgtccactgatttggatataggtgcaatacgtgagaagcaataaaatatacagtatgtctttagtttgtaggtaaagttatatatatttataaatagacaggaggtgtacgctagctatggaatatccccttgctaaagtttatataaagagcacctaactaatttgtttttgttcatggaagtgaacataataactgggaatgcttatcctacattatctaaagagaattgcataaaattgtttcaatctctagctaatgcatggtggtggtttggtagaaagccaagacatatttcacttagaatattgataccttattttatggtaaaggtcaactgatgatatttttaaagaagtgtgaaagctactatgcagcataagtaatccctttgtttcataaatttgccctaagtcattatctttaaccatcaatttctggaaatttgtgtagtttaacaaaatgtgaactgtacattctgtaaggatttttcatgttgtgtatctaacaacataacccttgtggtgttaaactatagtatcatttttttagaaactaatggtcaaaaatatatataagtgtttgaattaggacaaacgtagaatgacaagtaatttgaagcaactgggcgtagcatgtatcttgataaattcaccctattctaggcacgaaggtgatgcatacagtggcactaaatttcatataaaagactatctaagtatagaatagaaatatagaatggctagcacgcatgccctttttctttatatggatacatgtgtagtgacagggccgagcaactgcaacattaatctaaactgtcaatttcagatatactactacttatggctgcttgtttaggctaattaataattatatgtttactcttttcaaaataaaacacttcaaagctgcatgacaatcccgtcaacaaggatagtaatgacaatgagtagctgatgaaataatatggcttcaattctggagtttcaggaaaatttagctgctaaaaaaagaataagtgaataacccaaagaaaatagaactttgaaggatagaggtagagagattaaatatacactagtattcattttgtggtgcgtcgtacatgcttcaaaatctcccaaggaccataaaagatcccaagaaatagctaggtagaacacatgaaagttcagaaactggatataatctacacttcattatattactgtcaactcaatatgactgtgcttgaatggtttttgtgcagacgcaactgatgatggaacaagtggaggaacttcgcagaaaggtacattatcaatccaaagtttctcaagcatacatacagtatcagcattgccatgggcgggtgacttcaggagtgctagctactagtgataatctaaattaaaccacgaaatgacttggctagctttgacaatgcatctatattgccagcaaggctgctagggtataccgcatgcaagttaattagggtagatcgtgtagcctttgactgtataactaaagaaatggtagcttcgttcttgcgagagatttctttcatgagagttgttacatattatactatctccaatatatttttcttgtgccacaggagcgtcagctgggtgaaattaataggcaactcaagcacaaggttcttattcactcggaaatctgttatgccaatgcggtgcacatataattatttattgataattttcattcatatattctcatatccaatgctgcagctcgaggttgaaggttccaccagcaactacagagccatgcagcaagcctcctgggctcagggcgccgtggtggagaatggcgccgcatacgtgcagccgccgccacactccgcggccatggactctgaacccaccttgcaaattgggtaagattaatcaagaaaagccaagaccagaaatgcatatacttataacttctagctcaaatgcatacagctcgatcacagcatccgaactagtagaactaatgaaagattctcatcaaactgactgtgtatatcttgcttccattatattatctgaaaaacgattatgttactaggtatcctcatcaatttgtgcctgctgaagcaaacactattcagaggagcactgcccctgcaggtgcagagaacaacttcatgctgggatgggttctttgagctaagcagccatcgatcagctgtcagaagttggagctaataataaaagggatgtggagtgggctacatgtatctcggatctctctgcgagccacctaatggtcttgcgtggccctttaatctgtatgtttttgtgtgtaagctactgctagctgtttgcaccttctgcgtccgtggttgtgtttccgtgctacctttttatgttttgatttggatcttgtttgaaaataatcttaccagctttgggtaaactgtttattacgtactctatatagcatatgtgaccgacgacaacggtttcattttagatgatgtgtatggatgatttctttccaaaatcacatctttagtataagagcaattttaccatccaataccaaattttatactagaaaatattttgggatatcaaaatttatggtacctccagtaccaaatgttgaatggtaaactttcataatatacaagtcactctaggatatttaagacaatttttagttttttcttattgttgcccttgttaaatacatgagaaattttacatcacttaaaatgtatcaagaggtatcaaatttttttaatacaaaatttagtactttctccgtttatatatgaatgtggacaatgcttgaaagtcttataacctgaaactgaggtagtgtatcgagaagtacaaaattttacactaaaatcccagtacttactcaataactgtaaaattactctaaatatgtactccctctatttcagattataagttgttttaactttagtcaaagttaaactgtttcaagtttaaccaagtttgtagataaaagtagtaacatattcaacacaagacaaatatattataaaaacatattgaattatagatttaattaaattaatttggtattgcaagtattactaaatttgtttataaatttggtcgaatttaaaatagtttgactttaaccaaagtcaaaacaaattataatctaaaacaaaggtaatacattgtatcactctcatgaatggattgtaacatacattaatttaattactattttagttcttgtgcaaaagttgaaaacgatttatgtttggaatctttttgtggtgtatatatatgaaaccattcctctaccatccttccccaaccataatcctcacaaccgttagccccattgtgatctcacccagttgctagcctcttttgtcaccttgtcacagctctcctccattcattacacaatggcatcagccttctaatcctcgttgtgtagcaatctttcacatgcttgacacacatgaaggtatgatcagcatctaatttgttttatttttctgatttagtatcaccatccaatatgtgacttcaattcttggattttctattaatatttttttagagtaatcactttgacgattcatgaaattgtgaggcgcggttataatctagcacacaaatttgtaaaatatttatttttatatacaaactatatagtgcgtgtgaaccatagccaaaacaactcatggttacaagaaaatttgtgacgatatataacatatataacatattggacttttgatcgacatccccttttcaatgaaaccacaacatgtatgcaatgtttatctccagaacttcattccagctagtactgtttagttattgaataatgacaatgacatgacaatcagaagcatgaagatgatctcgtttttttcttgtaacggtatgggtgcaaactaattgtactattgaataaaggaatctgatcgaatttgccataacccaataattaatcaagtaggatgtcatgtgcactcatcaattgattggtacgtacatatgcattcaatattatacagaattttttccttcagtttctgtagattgctgaagctgtagcctttatctcacaagggaaggtggctcaacaggcacgcagggccatctgatcatggccgaaaatgattggtgttgctgatattgatgaatgtactttcgttcaaggtgagagaagaacgttggaagaatccagttaatggcgcaagtacatactagtagtagatttaattcaaactgctggtctagttaaatacgtactatattcatatttatttaggtgatattttatttaaacatataatagacgcaaatacaaaaacactcgtatacacttatatatttgtccttatgaacactcatgcacaccgtgcttctaactatgagtgtatatcataagaatgataaagttatcgtaggagcctcgttgttgacaagtacattgctaacaacttaaagaacaattaaccgtaaatacgaacaaccatatgtactaagtgtgatacttaaactcgatacacaggttcattataaaggaccttagcaggtaagctagactatttgctttttaaaggttaaatttgatgccaatgtgctttcaaggctgtgttcttttctcctgaagatgccccgtttgtttcttctgcaagggtaggataaaattttggattctcgtggcacgctttttaaactactaaacgatgtgttttgtgcgaaaactttctatatgaaagttgctctaaaatatcatattactccattttttaagtttgtaataattaaaactcaattaatcacacgttattaccacctcattttgcgtgaaacacttaatctttatcttcatcttcattttcaggagattcaaacaccacctaaggttaagttttttatgcaaaacgagatggtattaacgtatgattgattgagttttaattattacgaacttgaaaaatatattaatatgatattttagagcaactttcatatagaaaattttcgcacaaaacacatcgtttagtagtttaaaaaacgtgccacgaaaatcttaatttttcatccaactcttattaaagaaaagaacgggaccagtcaattcagtcagcttatcttgggccgtttgtttgtttacttcgaacacagtcaataattaaataacaaagtactaagaacgaggagggattaagatcatctagcttctctctaacgtggattactcattactgatatatggccgggttccttatgtagcgggtccacacgtcaacaattgaaaatcagagagaagtaattgagtcgcacttaatttaaaaaagttatactcgaaatttacaccgaaagttcagaaatatgagtgtagctgactcgaaatagatatatgccctgttccttccacatttagaactgtggaaggataaagaggcaaatttggaatattccacacattagttttgcaacgactagctaggagcttctgtataggacaaatgatcccagtcctacaaaatcataaagacattccagttgatacacaatcatgcatcatgatcaagtggatcaataaattatatatgcaaaatggaccagttcagctctcggttcagtgacgtactagtataaccataaaggttcaatttgcaaacattgaaaaacccaataccggaccagaaaaacagagacataccaaatgaaccgtttatcattataccactgtacacaggtgtattatctctatgacatgatttacttacatgcagtatctaatcatcgcagtaattacatgaacctcccaatgatcatgccaggtgccaggccgggccaaccaaccagctgcttgcctgcttctaattaattgttcctaccgtctaatcatcgatatattccaccgcattccgacacgtaccactctcctccagctggataatcctcggcagaaaaagaaaaaggaaacgaaagggaaagagagctttgtctccgttgattaacagcagcagtaagctagcttaggctgtgaaatggcgcgactgccctcccacccaaccgatcccgtgtcgcgtcgcggtcgcgcgggccaaatattgattcaccaaacgacgcccgtgaggcgggtggcgaggcggcccagtcgcccgcgcgggccggcggcggggcgcgcgcgcggcagcagggtggagcggcacagcgggcacgtcaaccggccgaggtcgatccaccggtcgatgcagccgcggtggaacgcgtgcgcgcagttgcccagccgccgcaccacgtcatccgcctccagcctctccaggcacacgatgcaccccgccaccgcctcgtcgtcgtcgcagccatgacagccgtgctccgaggccgcgagcagctgggcgaactcgaggggcgggaggcggtccttcacctcgtcgggcagcggggcgtcgacggcagccgggcggcccgatcgctccgggtggtggcagatcccgacgacgaagagcatcagctggagggcctccctgatggcggcgaggagcttggccaaggcgatgagcggcttggggatcgccatgcagtagcacaccagagggaaccccatgatcgccgctgtatcgagcttgctacgcacagttggcaatactactatacaccgagtcgccgaacgccgatggatgcacggaagcagagactgcggcgaaagagagtcgtggaaagcaaagggggaggatggtgacgagtgacgactagtcgttacgagcgcgcgcgcttatatagagcgccagcggtgatgggcgccggtcggcggtcgcggcctcgcgggcggtgtggtgaggtgatcgataccgagacgttttcacgtggtttttggtggataacgcgcgtgcggcgtgcggaaggaaccagaggcgcgcttgccgtacgttttaaccgcgtggcgtggcaagctgacgcgtaacgggacaacgtcgcgggttgttttgagttcgtttgagtttgaccggggtggtgcccccgccgccctggtacgtgcgcacggactacgggcgtgggggcacatgggaaacgcacgccgaaacttgatttgggcgagggcgagtgggcgtggggtccccggcgcggcaaagacggatgacgggctcgctggtcagacggaaaattcgtaggtgcttctactccatactgttgcttgtgttgtttactcctactaataatacacttgtacaacttgctatgcggttttcgacttttctcgcctcaccagagtacagcacggaagtggagtcatgttttgctttttttttccccgatgctcactgcgtgacggagtccaccaggcactagtggttcagagcgagactcaagggtactatacggagtaattcgcaaccgtatgtccatgttcaattcatacagttgacaggcgctatccgagatgaagacgatcgaagaacaagtcagcgcttgacggttgtaaaccacattggctagtcctagtgtggacgagagaggacacgtccgttagttgcattgatggagccactagcacatggatagagatggacggttgggattgggacacagatagcagtgacgaacttggtaacgttatggggaataggttttgcaatcaaactagtctagggcagattctgagttggaaagagcgaaatcgaactatgtaacattaaaaaaactattcaaaataatttcttgaatacaattttttttgaagaaaaagtaaatttcatataattacaaatatattaactaatctatcataataccatagatttaaaataatgtaccataaaactacaaatttaataccaaattcataataaaactataaatttattaacaaagttatcataaatccagatttagtatcaatttaataacaaaacttagatatttataactcaatgtaacattagtgctagaaactcaaactctaaattatgtaggttttgtgataattatattactaaatctttagatttgcaatagtttagttaaattatatgtagttttgagaaacttacttggaaaagaaaatgacaaaaatcaattttcaagtatggtcttttcaaaagctacccgccttactttaaatagggtaatgggagaggatgacaataactagagagaatcaaagccaataagattggagaacttaagtgatgattatatgttaaaggtggatgatagtgtaaccactctgcttctctagattgaggagatagcgaaattgatgatgggagaggggggaggggtatacggcctagatagatggataatctacttgaaaaggttgaaatgagttaggtgatggtgcgatggtactagagggattataagacgtagtcaatttttctgagcaattttgtattttatctccagatctaaagacgcgattgcatttcctacacattcattgctataatctgcatcgttatagttagcatgatccaaatacatgtcacaatgaaaattttttttcgctggtctttagagcaactagaaaattgtgcttttcttaaaatatgaatttaataatctattttttttacactaaatgtatttgttattggactactggttgatcaaaatctgtaaaatttacgttttaaaatcaggacgcaccacataaaaaaaatttcaaccgaggcagtatcgctctaaagccaacaacacggggactgatgtcaaaaacattataggcgctagtcgccatctgtgcccatttcgtcctgacgaaaaaagatttaggagaacaagaacttttgcaagtttttaaggagagcatcttggctttgtgggcgcctgggcaatcatggatcatggccgcctcatggttgtgctctcgcaaacccctcttctaaaccccagcggcacagtggcacacgacggtgcacgttgcaatcaattgcctttgcgtgtttacatgggaagggtgcacgaattcggtgagccatcctctctgtcgcgaagaggcatgtctaccggtggcacgcacggccgagcgcatgatttcggttcgctgagcggtctctttcgcggttaggcgagtgaattgacaccgagacacagcgatgtgcacggcagcacggggaatggggtagaatttgccgcggcagtaagagattggttcgagttggctgttgctgtcgggcaagatttgggtcgcgttacgcagctacgctcgagccgcagcgtgaccagcgtggctggaaaagggttctcgtagacgattggagttcgagaatcaatgcgaaaagcaaacggtgccgaatgtaccaagaatgggtcgacagccatttggccgaaccgctgaagggagatgcatgacaggggaggcggaacaaatgaacaaaaacgttcacggagcaggtatgatagtagtaacacgacactgtttgatggatgattcaatgagtgtggagattatggataccccatatctacatcacagttgtaatttagtcgaatatacggtaccaaatatagatggaatatctctacgaagactcgagtcagattctaaacttgtatgtcaaggaaatacccgggattttagtcggttatgattgtattttatctataatcccatattccgttacatcccggcctagggcttaataggattaatagaatactcatatcaacaagttgcaacttcttttccggaagccaatctccaaaaaaactccagggttaagcgtgcttggcccagagcaatttgggatgggtgaccgaccgggaaattcttcccgggtgcacacgagtgaggacaaagtgtgcagaaaagacatgtgttggtttgttggtttgtgagggcagtctatgacctatgaaagctatcaaatgtaagcgggcccggcctggggtaaggcagcatggcacatgcgctggcactggacacatgaacgtggccaagagaggacgttcctggcctagggttgatcgacggggcgtcgatctctcttaagggggtgagggtgtaacatcccggcctagggcttaataggatgggtggcccagagcaatttaggatgggtgaccgaccgggaaattcttcctaggtgcacacgagtgaggacaaagtgtgcagaaaagacggatgggtgaccgaccgggaaattcttcctaggtgcacacgagtgaggacaaagtgtgcagaaaagacatgtgttggtctgtgagggcagtctatgacttatgaaagctatcagatgtaagcgggcccggcctggggtaaggcgggacgttacagatatggactgtattttgtaaagcggactccttcccctatttaaggagggtccgtgtgcctcttggggggcgattctttttttccactttatacaatcaataacacactcggcggaatcatccccggacaggagtagggtattacttcttgaataagaaggcctgaacctgtataaaattccttgtctcaaaacccatccactttcctagcttgatagccacccccttttattattgtcgaaatcttgcttcgacagttggcgcgccaggtaggggcagcatcaagttctcgccgactaagtgcgatgggtttcgtttctggcatcgacgacttcgccttccctcccgggcaggcgttccggttcggcagcctcaacttcatcaccaacgacttcggcaagatctctctccttgactcggattcaaaccagtcggggatagaccaggtccccgtgccgttcggtattccgaactcggccgaggcctaccctaagatcatctctcccgagtcggcttcaaaccactcggacgagatccaatctactcttccgcgaccagatcaagacgacgagtcctatccctcaatcctgatgaaacttcctgatgatttggccgctgtcttcacagtcaagacatctcccactcgaagatctaggcgagctcaagcttcggccccgatccgatctagatccagggaggttggcgttatactccaacctctcgggacagtctcgacggaagagttggatggttacctcagctcccccggcatcagttctcgaccaaccgagatcctcgactacgacgattttggctaccactacgaccacggcgacctcgacaacttcgacgacaactatgaggataactacacgcccctcttcttcggcgtattcatggctgacaacgaaacggaggaacagcgccaagcccgagaagcggaccaagatcgcgcacggcaagaagctgaacgtcgccgactggaggaagagcgacagcgacaagagcgagaacgactacagcgtgagcaacaagatcgcgaacggattgcaaaggaggctgaagatcgacgacaatgcgccttggaatctaggcggcgagcgagagagctcattggacaacaagacgtcgatgggagagcggtctttcgcacccctagcagaacgcggttgcagcaatcactctcctcaagaccctcctcatggaagacgcactcaaccaagctgatcatgtagtcaacatcttgaaccagacgaagaccatgatcgctgcctcggttccggccaactccgcaagcacccgcaccccgactggtagccgagtccctcatcttcgatctcaagactatcaccagccaagcctcagcattgccggcgccgaatctagtcgcaggagcaggggacatgatgaacggtctgttcgctcgcctcccgagcgatatagggagcgccgagttgaacgaccacactccccacatcgaaggcgccccatcgatcttcgcgacaccatcaaccagcgcccgcagcaagaggccatcattcaccggatcgctacgacgacaacgtggacggagttgccgccttcacaagcgatctgcgtcgagtggattggccagccggctttaagccgactggaatcgagaaatatgacggcaccaccaaccctgagtcttggctcaccgtctatggtctcgcaatccgcgcagcaggaggagacagcaaagccatgacgaactatctacctgtggccctagcggattctgcccggtcatggcttcacgggctaccccgcggcacgatcggatcatgggcagagctacgcgaccacttcatcgccaacttccaaggcacttttgaacggcccggtacacacttcgatctctacaacatcgttcagaagtctggagaatctcttcgagattacattcgacgcttctccgagcaacgcaacaagatctccgacatcaccgacgacgtcatcatcgccgccttcactaaaggcattcgccacgaggacctagttggcaagttcggacacaaacctcccaagacggtcaaacagatgtttgaaaaagccaatgagtatgccaaagccgaagatgctatcacggcgtccaagcagtcgggcactacttggaaaccaaagaaggatacgccgaccgcaagagggagtggaagaaacaaccacaaggatcgcaagcgtaagcccgaagaacttgtggccacaacctctccatcttcccgacaacgttcccgcgtcaacaccttcgacaagataatgaactcccaatgtccgcatcatcccaactccaaccacgtggccaaagattgcttcgtctacaaacagtttgcggagcaatacgtcaagaacgcacgtaagccctcagacggagatcaaggcacatcaaagaagaaagatgatgaagacgatgccctgaccggttttcaagatcatcacaaagaacttaatcacatcttcggcggacccctagcttatgagtctaagagaaagcagaagctaacggaacgggagatcaatgcggttcagcctaacacgccccaatacctttagtggtcagagatagcaattaagttcgaccgctcggatcatcccgaccgagtggtccacccggggcggtatcccctggtactagacccagtggttcgcaatgtcaagctccaacgaactctcatcgatagtggcagcgcactcaacatccttttcgctaagaccctggataatatgtagattcctcacacggaattaaagccgagtaatgcacccttccatggtgttatcccaggattgtcagctacaccactcggtcagatcactcttccagttaccttcggcactcgggagaattttcgcacagaaaatgtttgtttcaaagttgctgatttcgagacagcatatcgtgctatacacggacgaccggctctagccaaattcatggccgtcccacactacacctacatgatgatgaagatgcctggtcctcgaggggtcatatcactacggagcgacatcaagcaagccgtcacatgtgacaaagaaagttgcgagatggcccaaacccacgagaccactctcgcccgcgaagagatccgactggctgcgaccacggcaagcgagggagaagtgcctgcaaccaagctgacgaagaccgaagaaagtgatgccaagacgaaaaagattcccttagatccctccgatcctgacaagactgctgtaataggcgctgagtaagattgtaaataggaaagcgcgctcatcacctttcttcagaataataaagatatttttgcgtggaaaccatccgatatgcctggtattcccaaagaggtgattgagcactctttacatgttaaggaagacgccaaacccatcaagcaacgactccgccgttttgcacaggacaggaaggatgcgatcaaggaggaattaaccaagctgttagcagcaggcttcattaaagaagtccttcatcccgattggctagctaacccagtcctggttcggaaaaagacggggcaatggcgcatgtgtgtcgattataccgacctcaacaaatcttgtcccaaagacccttttgggttacctcgcattgaccaggtggttgactcaacggccggctgcgagttactcagcttcttggactattactcgggatatcatcagatccgactaaaataatccgaccgcttgaagacctcatttattacgccctttggggcctactgctacatcactatgccctttggattgaagaatgcaggagcaacctatcaatgcatgattcaaagatgtttttcaactcagatcggtcgcaatgttgaagcttatgttgatgatgtagtcgtcaagaccaagcagaaggatgacctgattgcggatttagaagaaacttttagaagcattcgtgctttcaagatgaaactaaacccggaaaagtgcatcttcggagtaccgtcagggaagttgctcggatttatggtatctcaaagaggcatacaggccaacccagagaaaatcaacgccatcctcaatatgaaaccgccaagctccgaaaaagacgtccaaaagctgactggttccatggctgcgctcagccggttcgtctcacgactcggcgaacgggggatgcccttcttcaagctgctgaagaagactgacaatttccagtggggacccgaagcacagaaagcctttgaagacttcaagaaacttctcaccactccaccagttttggcctcgccacatccgcaagagccgctactattatatgtgtcggcgacctcccaggttgtgagtacggtcctggttgtcgagcgtgaagaggaaggccatattcaaaatgtccaacgtccaatttatttcgttagcgaggtcttagtcgactccaagacaagatatcctcaggttcaaaagttactatatggtgtcttaattaccgtcaggaaattatctcactactttcaaagtcactcggtcacggtggtcacatcgtttccactcggagatatacttcataatcgtgaagcaaatggacggattgcgaagtgggccttagagttgatgtctttggacatatcgttcaagccacgaacttcgatcaagtcacaagcgttagctgatttccttaccgagtggaccgagtgccaagaagacatgccagaggaaaagatggaacattggactatgcattttgatgggtcgaagaggcttacaggaactggagctggggtcgtcttgatttccccgactggagaaagattgagctacgtattgtggatacatttttctgcgtcccataacgtggcggaatacgaggcgctactccatggattaaggatcgcaatctctctaggcattcgccgactaatcgttcgtggagactctcagttggttgttaatcaggtcatgaaagagtggtcttgtctagatgataatatgactgcttatcgacaagaggtacgcaggttggaagataaattcgatggactcgagctcacccatgtcctacgacataacaatgaggcagccgacaggctggccaattttggttcaaaacgggaagcagctccttcagatgtgttcgtcgaacatctttttgaaccaactgtgcccagaaaagaaacacttgaagccatggatactcaaggcgtaagcatgattgaaaccgactggagagaacctctcataaaattttttaccaaacaagaactccctcaagacaaaaatgaagccgagatgatttccaggtgcagcagactttacgttattcataagactgagttgtacaagaaaagtccatcaggaatactgcagcgctgcgtatctttggaagaagggagacaattgttgaaggatatacattctggtatttgtggtaatcatgctgctgcacggactattgtcggcaaagcttaccggcaaggttttttctggcctacagctgtgtctgatgctgacaagattgtgcggacatgcgaaggttgtcaattttttgcctgacaaactcatctgccagcccaagagttgcaaaccatcccgttgtcctggccgtttgcggtctgggggcttgacatggtcggcccgtttaaaagggcagtcggcggttacacgcatctctttgtggctatcgacaaattctacaagtggattgaggctaaacaggtcatcacgatcacagcagataaagctagagattttttcatcaacattgtgcatcagtttggggtacctaatcggatcatcactgataatggcactcaattcactggtggagcatttagatacttttgtgaagattttggcattaaaatttgttacgcctccgtggcacaccccatgagtaacggacaagtcgagtgcgctaacggcatgatacttcaagggatcaaagcacgcgtttttgaccgactacgtccctatgctggcaagtgggtagatcagctgccgtccgtactttggtctttacgcactactcccagtcgggctaccggccagtcgccgttctttttggtttatggtgcggaagcaatgttgccgagtgaagtggaatttgaatcactacgatttcggaacttcaacgaggagggctatgaagagggccgagtagatgacatcaatcgactagaagaagcccgagaagcagctttaattcagtcgactcgatatttgcaagggttgcgccgttatcataatcggaatgttcgatcgcgagcctttttagtcggcgacctggttctgaggaaaattcaaacaacacaggatcggcataaattatctcctttatgggaaggaccgttcataattgctgaagtcactcagccaggttcttatcgactcaagcgcgaagacggtactctcatcaacaattcttggaatattgaacaccttcgtcgattttatgcttaggcatttcgtttgtatctttcctctttgactgctaacttcaagtttttccttgaagttttcagtcagggggctactatgataataatggagtgtgatttttatcaattcaatttgcttacttgatttatcattgccctgtttggtctttcgacttaaccaatgaggactgaaggtttttaatagcttttgcgggttttaggctcaataaggcttgacaaaggcctttaagaaatcagaagctaagtatggaacaccaagcatagcataaattcatcagtattgtacaaattgagcctccactgtcattgatcatcaaaatcattgttatatcaatcagtatcagttttttcatcattagacttatcagacccagtcggccgaaggtcgacatcttggaatctctcaactacatcagcagcaatcttgtcagccgctttctgcgcatcactgatgaggtcgagagcagcttcttcgctcgtcccatctgcaaagccatcaatggcatcaatgtcaactcttggataaagggatttggtcatcgccaacgccagactcgctcccatacttccagcttctttgatgttcttgaagtaagtatctggagcgactctcagcttgtcgaagatttcggcagcatcaagtgtactcgaaccagcgttattgaagaacatggcctggataagtggagtagcggcattagcgactttatccctggctccttcaagcttgttgatattgtcaactaagacatcaaattgtgcttgagacttgatcttgcggtccgcgtcgacagattcacattaatgaatcagcatatagaagataatggcttttgaggtattgattattgttaccttcaacctcctttaaagtcgaatccctctgtcttgccagctctgccttgtcattttccagagtttggatctgcttctctagttgagatatcttggcagcttgcactacattaacttcggttaatcaagattacagagataacaacacaaatcagttgggcagagtttgcgcgaaccttttgatgagccactcagttcgaaattggactcctggagctcagcaatccgatccctcagatcgtgttcattcttcttggcaagttctctggcctcgtgcagttgactcctggtggctttgagggttccaagatgaggaactagtctctctagggttgcggtttttgcctcgttcctaagatgaatcctctgcggagcagtttaatcagcgctcgagccagacggtaaacaagatggctaaggtcaggcgtcaaggaacttacatttacaatgcgagtcgcttggttgagttcctttttcagtaggcatacctcttcgtcttctttttgccggtttattacaattccttgaggttgcaagttgtcatcccaccacttgaccagaataggagggcacgaatcttcggctgcttgtatacggggaatttcttcttcatcaccgatcattggtcctaatgcatccattgacaaaggttagacaatcgatcagagttatttgggtcaacatggtttcgggcaaagtgtttacctgtaatgatttctggacgaggacaagtggattcggatgcctttaaaggggatccagatctccggtcattgctggcgtcttgtccgcgagggttgtctgcttgggtttcgacttctggaatctcttggcttggccctgcgtccgactggtttccaatcgggggctcctgattaactccggcttcggcttcggccgactggatcccagtcgggggttgatcaccggattctaaattatcggttgccggttgattgtcactcggatgatcctcagtagttgactcggtttctttggaagaacttgtgtccacgttagtcgggtcagagtccttcccagacggatctatatcagatggtttcctgcaaatttgattatcagtattattgccgcaatgggtgcgcatcaatgcaagagagatcgttatatgagttgcacctagaagacttcctgatctttggcacagggcgactggatgttttcttccttggagtagcctgttttgttagtttcttggttgtctctcggtctccaggcctcctggcggtatcatcggcttcgtcgtcacttagaaccagcttcctctttcgagaatctgactggctgattggatcagaagcacttggttgagtttcagaccgaattcttggtcctccgctcccttgcccagtttggtggcggggcgatcggtgttgggagatccgacttcatcaaagcaaattcctgggtgtaatatccttcattgttaactgattcaacaagaaaacaagatcatattttgagaaaggttgaagtgtatgaatacgtaccggtggaggaggattgaatgcattgaacggtacgactggcagcaagtgtgagtagctgacaacgatggtgtttgagaagatcttatacatcctttccttcatgaccttgaagtcaagagaatctggatcttcacggtttgggtcatgcttgccgtcaaattcgaaggctgtgcgagatctttctttgattagagctaaccgacacttgataaagtgccgggtgatctgttctccttgaaggccctgttctttcagctttatcatcctctccatcagttctactgcttgtgcagcttcatctcccattggcagtgagttccaagtatcccgataaactggaggaagacaggagtactcgggaagaacaggctcggggttttgaacataaaaccaatttgcgtgccaacctttatttgaggtcttgaagggcatggagaagtatttttggcttattgttcccctgagttggaaaccagcacccccaacgacgcatggtttactcttatttggctggggcttgaggaagaagatgcggcggaacaaggcgaaatgaggcctaatgcccagaaaagcttcgcaggcatgaataaaattggcaatatgcactatgaagtttggattcagatgatgcaagctaatcccgtagaaattcagaattccccggaaaaatcttgaggttggaagagaaaatccgccatagaagaaatgagcgaataccacgattttgtgtgtatcgggggtcaggaatgcctcaccaaatgccggtcgccacccgatgatctcttttgctggaagaacgccgtgcgccaccatctccttcaaactgtcttccgtcacatcggagggcgcccactgactctcgaagctttctctttcttccgccatgaatgtgaactggatggtctgatttagttcgagatacggctggaaagggatggggaatcggagcggtggatgtggggagaaatttcgtgaagtttttgagggtggattggagcggattgatgaaccctagtttgcccggcgcagttttgcattgtagcaggaaatggggaaaatggcgagagtttcggcggggaagacgaagagacgtttttcacttcggtgttattagggtatcgggggtactaatgggcctgggcctgtacagtacttcagcccaatactataatcagcgtggcctgttgtgatctctagggacttaggcactttttgctttggcaatctgtgttcacgatggtgtggcccaatgctgttaaaatcctttttaacgcgattcaataattctttggaattattatgatgcacataaaaaggcgcccgacagaaaggtgttataccattttttgtaagctttattaggctgcaaaagctgtttgggttgatttgagatgactggtttattaatagtcattcttttagcatgttatatgcttattttggttatggtaagggtcacagcctaggctattggactcattaattaccatgattttctatcctgtttggtgggtcattttatgagatttttactcggattcctatcaaacatgtctatttttggacctttgagtgtttatcactcggctcttcttgtattttttgtccttgatatgctcaagttgagaagcagtcagctaggtatcttactaagtatcatgcgtgcttcgctataaaaccactcggttcttgactatatgtttagtttttcaactaatcacatagtcgggggctacacctaattaggtgtatctactcgatgcaccatgttttattttcgcccttcacagtttttgatttttagtactcggcaagccggagcaagttgaattgaagcactcagattactgttttttgtttcgagaaggctattttgtcaactgtgaaggtctcgggggctactgtggagattatggataccccatatctacataacagttgtaatttagtcggatatacggtaccaaatatagatggaatatctctatgaagactcgggttaggttctaaacttgtatgtcaaggaaatactcgggatcttagtcggttacgattgtattttatctataatcccatattccgttaggatatggactgtattttgtaaagcggactccttcccctatataaggagggtccgtgtgcctcttggggggcgattctttttttccagtttatacaatcaataacacactcggcggaatcatctccggacaggagtagggtattacttcttgaataagaaggcctgaacctgtataaaattccttgtctccaaacccatccactttcctagcttgatagtcacccccttttattattgtcgaaatcttgcttcgacaatgaggatgtccaaattaactcatgtcgctgccatggtttcttgtatatgattgctgccatgttgattggatgcaaaagtgcaccattaacattattagagctgaaaggctcgtcagttacagttgcggcatccaaatcaattgatggataggtaccggatgtggaataagttcactttagttctctcaatttgtcgtccagtccagaaaaccggacaatacatcccttaatttataaaactagtacaaacgaggtccctcggcagtattgaccctggttttagctgacgtggatcttttgactaagtcttcgtcctactatgcattgacgtgaggcttgcgtgacagattgatccaaaaaaaaagagcaaaattgaaaaaaaataaaaaaataaaaacaaaagatgtggggcccatatgccagtcaagcaagaagataaaattgtgtgttagtgggtcccacttcctccacctcacccctctcctccatctcctccccctcactctcaatggtgagtcaacggcgactgcatatgccaagggaggcaattgtggcggaggtggccagcgaggcagcgaggagggagttgcggcgttccggtggaggagaggatggaggcgagggagccgacgagctcgagctcgccatccctgctccagcttcatgaggcgttggaggagtcagaggagaaggccgagccgcgtcagtgccaccaccagcagtggtgacggtacagggtctagggcggcgatgcttgcgagcaagcccttgcggtggtcgaggcatcacatcgtcggagggaggagatgggggtgtcggggaaggtgtcgtcgaggtattggaggataaaagactcacaggcggtgtggccggcatggaggaagacggggatcctcttgtggatgaggttggagcatagcaggaggttgctctagttaccgaggtcggacggggattttcccgacgcctagaagggactggcttggggggaggggctcgacagtggtggaggggtagagatggtggcatcgatgccgagaacgacctcctcctacgctcaaaccctaccatctccacccctccaccactgccgacgccccgccgacaacagagctcatcgctagggacaacagtgaagaggcggcggcctgaatctgtgcgaacgggaagggcgcgtggcggacgggcgagtaggtggcaatgggaacggtggagcaggcaagcgaggcgggcggcggcggaacgaagcgacagcgggtggagacctcggtgaggcggtgttaacagtgaaatttggtaatcgacaaagacgtcatcggcttagaatcattatcggctgcagcatctcggaatcagccgatgggagttatcaagtcgctaatagtcggattcctgttatattcggttaaggaaatcaatctactaaaggaagcttatccctaagtgaccgagtttaaagaggatgcggcatggcagtttatctattaattaggaatagtttgttagtttccttttatctttaggaaagtgtgtttagtatccgataatgactttatattttccttttatctttaggttagtttctttcttgtccgacaaggacttgtatcaacccatgggtataaatatgtacacccggggtctatgtaatctatctccacgatcaatataattcggcgcatcgccaccttttaccttttctactttattttattgtccagcggaacttggcacccgacgcagggctacatcgtcttcgatctccggcgaagggataagtccaatgttccgtcggcccaggcaattgtatcgtttacgtcggcgtcgttcgaggctgcatcagtacattcgacctcttggattgctctagtttggatgatatatttgcctacctatttatcatatgtctctgttaatctagccttagcatatcaatttagctctatcggttgcttctcgttttagggtttctgccggtatcggctaaatcgtgttgctagattagattagcttagacatctaccaccctgaaaactcagtcaacggcttgattgtctagatattatgtttcttttcatacttagtgctgcatcagttaagtttgatatactaagtcgtgcttagaaccataatctctagcctgcttcttgattgccaataagggtatcatcggggtttcagccggtgagttatctaaacgttgcatcggctcataaggattgcatatacatataagttggatttagccgatggcaacaaaggtttcactgtttaatctaatcttgtggatcttatgacatcggacatccaaccgatgtgtgcttcaaccttcggatcaatatttgttctactatttcatattgttagccgattggtttctactggattatattgctatattatattatcatcagccgattgcctttatatcattatctacattggacatatagccgattgcttaaaccctatcgctatcggctggtatcggcatcggctattatcgactatcggctggaactactccatcggcttgtcagccgatcggctgtttgatctattatttgcaaatcttgccagttgcaggattaaactgactggcacgctcgcatctcattaatctttggacctgcacaagagctaagcagatctcccaggccggtgtgttcgattttttcgtcaacaggcggggagatcgtggctgtcgtgagggcggcgctgcggtggtcggccacaccccagcgtcgccaacggggttggggagtgaggagggccattgagactatggaatgtcgttgtcgcgagcaaccccgctcggtggcccaaccggcgaacatcttccaggagctcgcccatcgctgctccgcccttctccttgtagtgcagggtagagagagggggatagagagaagatggagtgaggatgacatgtggaaccacatgagccccacttttttattattttgtgtgtagctggttatgtgggtcccacggtttttattatttttctaagatcgaattgtcacgcaagcgccacgtcaatgccatgtgggacgaggatctagtcaaaggagccatgtaggtgccacgtccacgtcatccaaaactaggcacaatgctgccgagggacctcatcagcatagttttgtaagttgggatgggttatatccggttttctagattgaggatggaaatcagactaggcaacaaattgagggaccaaatgtgaaattattccaccggaagatggcccaaggacctaattcagcccatcatccctcggaagatggaatattgtactgcattgaattacgtttcagggcatttacatacctctggattaattaatttcaaaacatagtactccactaagtttgaatatcgaaaaacatatggagatgttatacagagtagaataaaaaaagactgagaatgtgttggcatcaaaatctttgctaggccctcaaaagctttaattacaggtttgaaataatctcttcagacctctttggtggttgagaagaccccccctactccctacctaaatcctactccaggaaatatgtatgaaaagaagacacattgtacaacctaaacatgatcaaatatccaggaaatattatattagcatatgataatgttatcaagaagcaaatgaagaaagttagcgcgatgaatagcacagcacgagcagaaaaacgaaaatgactacaggactaaatgcaggagcagtgagcagtccatctatccattcatcagctgattcttgtactggcaggctagtatctatatttctatgttcacaacacagataacttccacaaagttcaagttaaagctggccacaagatcaatccttgctgcaagtttcatgctttccgtagcttagcaggagagtagagtaatgaatatatcaagagatcaccaacataagacacatgtgaactgatggaatagaagaaacgccaaggcttcagagtcgaacatccttcagaaaacatctgcatggcaaaaaagggggtttcatatcaaatgtacagggttactacatcgataatagacaaaggttaagatgattcacaagacattagaaatgctaggcagctgaaggagaagttaaatattttcgaagtagaacataatcaaattccatgccatgttccattgatgtcccagttgtgaagcgatttgaacattgcttggattgcgaaatttggcggtatgtcatgctggcattaaagaatatatcatctaagcaaataaaatgcagcttgcaccagagaagagtaagcagggaggcctaggaattgttgtatgggctttatgtttatacagatagattaaacaatctgctgcaaaaaatatcaaattactcaatatagaattagaactgttgggactaagattaaaagaaacatatatattacaaggacactgacatagacaataatatccagaaacagtatctgaagtgcgagtacggtaggataaatggcagtcagacatactaggttctgcttctagttagcgcttcttatttgatgttgaacaaaataccttgttggctcttgttgtgatgggaatttacaccttgtaaacagaataatgaaaagaatggagcatagtctaaatctgttttttttttccatcaacagtcagaatataacttacgatcataaatagacacaagtccaggacatcaagaaaataagaagatttcatctaatcctggtcagtgctgactaacattgagggaaggggcagaggaggtggtacaatcacaggatgaaataatggacaaatgaaggtgacaaagtgtcataaaaagtgcttgtgtgctgattgatgtttcgatttggtttgaaccgataacctttgttcagttggtgcaagtacaacaccactataataatcatgccttctagtttgtatggaaatgaggcatcttgtattgtcgatcattccagaaacatatccaccagacagttcatcacaaattgagttcacccaacaatattaggaaattctaacctttataggactgatgaatgaggttacttttgcagtataatgtagaagcttctgataaatcaaattcaacaatcccaaaatctaatactaatgtttagaatcagcattattcaatcttaaaaatattatgctatgaatcaatagactatttgaaccatgaagggccaaaggaaccaacctcgtcagaccctgagaagctggaccttgttctcaaaggcaatcgatatccactccgggtaagctgccgcccattgcagttggtttatctctgcaccggcatcatacaccatcacaggatcaatcccctcggccggcactgcgccgggcgtcgctggcagctcccaaatcagcgcttggccgtcgtccccagccgagcaaaggtgcctcgtggcctgtggcgcccaagcgaccgcgttggcgcacgcccggtgtctgtgtagttcggccaccggcaccccgggcgcgcgcatgtcgagcacgacgacggcgctgctgtccatgagcagggtggccatgtagtggaagtcatagcggttccatgccagcctgaggagcggcgtgtccgggcgggggctctcgtagaagatggtggaatgctccttgtcccggaggtcgaagacgcggacggagccgtcggctgagacggaggcgaagatgccgttctccccccaggcgatgtcgtgcacggccttgtcgtgcgcgatgagctgcgtctcgacgacgccgcgctcgatgtcccagatggtgcaggtggtgtcgatggaggcggtcccgatgcggcggggctcggcctcgttccagtcgaaggaggtgaggggggcgcagaactcggaggcggatgtcttgcggttgtcgaggacggagcggagctcgggcgcggcggcggtggcggtggcggcgagatcgtcgagcggggcaagccagagccgcagcgcgtcggaggaggaggcgaggaggtggggcgcggaggcggcgcgcgggtggaactggagcttggtgggcgggtaggggtggtcgaaggagagcgcggggagggcgcggaaggaggcggcggtggggtggacggggtcgaaggagaggagggagacgcggttgtggaggtcctcgaggaagctgccggcggcgaggacgggcgcggagggggagaaggccagcgcgtagatggagtgcggcagctcgcaggtgaaggcgttcgggttctgcgcctccgccgccgaggcggctaccgacggcggcttgggctgctccatgggaaaaatcgttggattcgcttcgctttgcttcctttctttctcgggtggatttggggatgaatggactcacgcgccgcggtggttgatcgggtcggggagttcagagtaaaaaacgcgagcagccaggccgagcaggtaggagggacggcgaaggaggaggcgcgtcaacgcgcgcgtgccacggcaaccggccggtaaacgtcagctcggcacgagggttgaacgggcgacgatgcgggcatgcggccgccgggctgctgcagttggtggccgcctgaagctgattcaacggtggggccagaccgtcagtgacttatagtcaaagctggtttcgactttcgactggaatcagtttaacttaaacaggatgtactcatttactcaaccagcctctcatgagttcttgagcaaccggcaggacaggtcagtcctctcaagcaatgcaaacgatgctactaccatcaggatagggtagtgccccatggggaacaaaagaaacaaacagttaagagaaactgcaaggcagaatttgcggcttttaacagctgaaaaccagcttagctaatagttgccacttaattaatataaaggttgctctctttctcacagattagaaaggcaaaaataacgagtctaggaaaaacatttttccccaattctgatttaagcagcaactgaaggctacacatcgtcgctcagcgtgtggaactgaacagagctcggctgacaataccagttgcctcaatgtaacgatcaacacagcgtgatatgcaactgctctcgctcccgctcaagcttgatcctggctttgtcacgcacttggcaaagcacttgtttccaacagtctgtaacaacaaaacaagagagaattacaaccatgtcatgtgtttaacaaagaagcaatgcctggaattggcatgttttatttcaaacactaccctttttctcatgtaatctgtattacatatatgtcatgtaaaccaacagtggcagaatcacttgatcagcaagactaagggtgagtttgaggagaaggtgattgaggagattgggaagatacgtaaaacgaggtgagccattagctcatgattaattgagtattaattattttaaatttcaaaaatggattaatatgatttttaaaagcaactttcctataggaaatttttacaaaaaacgcaccatttagtaatttggaaagcgtgcgcgcggaaaacgagatgttatctccctcaatgttacccgaacgaacgcagcctaattactcatatgtcaaacttcgtagtaatagtgtagcaacaggaagggtcaacttcaatgctaactttgtgaacacatattttacctttctggtcgtggcaggccagcacaagttaatagttctgactctatgttgagttcaaatatataatgaacacagaagtgaaagacatacaaaatgtcaccatagttttaagcaaaggaaaagcacttgaaatagaaaatgcaacagttagaagtatataccaaaactcaggcctgtattataaagtctaggtgactcgatgtccctggtccagtcaatttaaatagtttactattatatctattggttttataatatgcttaagtcatggatatgtactggatcctaagttccttctatcagtcctacaaggttgtggtcatcactagactggggagatcttacctcatcaagacaacattttaagtttccaaattcaatatgtattgtaaatgatagatgagtttgatgcacctattccaaatacgttgttacagttcaccaaagggtgtgctcaactgtgcttgctgcgcagccacagcagccagcatatcgatcaaccccaatttctcttggtacttaaagtgtgcattaagactgttaaatttatgctcttcaatcctcagttttcttgataaattcaagaaatcatcaccgtataaccgtatatgccaagtaaaaataacaaaagaaatcaacagatgagccaccacatccaattgtgtgattcaattggacatttggacgcaatgcacaccagtatgatcaacttgtatcagtatgcagattacaatcaatggatacagtgagcatgaaagtcacagcatgggcatgttgattccaatttaataatactttcttaagcggttccaagttaataatccttttcttggacaaaggaaatcaatttatgagttttagccatcctatgcaaacaataggacttactggagtgtaatgggattgagtatagatttaatcatacaagatacaaggatacagaaactaaaatccatcctatgccaacatgtttaaactgtatcgccctccaatccggtaaatggaactgttgtaacttgtagaacatcaaaccactctaacgaagctattgttaagcttgttgaaggtgctactgaatactgatgctcattactttagtactagaatacggaaaaccacaaaacaggaaactaattctacccccaaatattcgcttccgtagagtgctaccagcgaaatctagtgtcacctaaaccaagtatccacctacctaatgaatattcatccatacagattcgcattaacaaacgtgatacaagagaggaaacgatttgggtggggaggatctcacctcaaggaactcctgggcgtaggcctgagcgagctgcgccttgatctggtccatgagcgcctccgtattggggggcgacccggacgacgacgagaaggagtccatgccggcttcccaccttcttgattcccaagccttcgtcggcgaccggttgttgaagagcgctctccagcaacgacgattctccggcgcggcggggtgtgcgaagcggaggaggcgggcagagcggagtaataaaaccctagctttactggatcagaaccacgaatccacgattgggaggaaagggtagtaggcccacatttatcccccaagaaagagcccatatagtaattgggccgtacagcggaccatctctcgtggctatgtggatttaagccgaaaaaagtctactttgagtccttaaagtagtccgaatctaatttgtaccccttaatcagaaagttaggtaggacgactccccaaactattggaaccagtataatttgactccctcgaaggttttggaggacagtttcgctgatgcggtactttgacctagtataactggttgagttggtgtgtggggctacctttcttctcttcgttccctatcccctcctcaccttcctctccgcgggaagcatcagggcagcagatcgacggcaacagggggtgcacagcggcagtagcaagggagctaggccccgaaggaaaaccgcgcaccaccatcagacgtggcacccccacgttgggtcacgccactggcctcgataaagagccgtacgcatcggcattggtcgtggcaccatatcccaacctcccccggtagatggcggcggcatggagcggaaaaggggtagtaggggcggcagcgcgttgcgagcgattcgaggcgaaccgagcgacgacgcgacctcgtggcggagagcggcgatgtctctttctcccttcccacacaagtacacgattcgagatgaaccgagtgacgatgcagctgagtcggagcgcagcacgacttcgtggcggagagtggcacaactttgaggcattgcacaatgcggcccaaggaggagcaagcggatctaagcgggtcacgtcatcgacagccggaccacgccaccctccctgtggcgtcagcccataccactagagcacaccgtgccctccctgtggctcccgcgatgctcgaagccctcctcgtgaggggtgcacaaaagcttgaaactcatgagctaactcaactcgagtaaaactcgggtcgacttgagtagttaatgagtcgagttgagtttgaacttttacttgtttgcttaacgagccaactcgagctagctcatgagttacttggttagctcgctgagctcatgatgcattaagatagaaattgattgttcatattttgcaggtgtaaaagtcgtgaactcataattatacattatagcacaatcttatgagtcatgatacatagcatggcaatcataatctttggtcataaaatcacaaattatactgcatatgaattttaaaccatgtatttcggtgtaacgagtttagtgagtttaatgaatcaactcagacttttattgtgtcgagtcgagttccatttttaacttgttatgttaacgagtcgagccaagatagctctttaacttaacgagtttttacgagtcgaggtaagtcggcttgtgagccacccaacctcgtggcgtcggcccaggctgccgaagcacgccgcatgctccttgtggccgctgcgttgctcaagcaccgtcacgttgaggccctctcacagtctggctcctttccccgctgaccaccacccactgccctggagaaaaagagaaaataaaaaggaatgaagaaaatgtgacactaacactgagtcagccgattggactgggtctaagcaccatgtcagcgaaattaaaccacactccaaaacggttaagggagtcaaattataccaatttcaatagttagggtagtcatccggttttccgattaaggggtacgaataggattgtacctacttttttaagggagttaaagtagactttttgcatttaagccttggaatggcctacgtactcacatataaggaataagttcatctgaggtcccttaacttgtcaacgaatccgattttcatccttgaaccgaaaaaccagatacaacgggtccctcaactatcaaaaccggtgcagattaggtccttcagcggtttagatagcggttttggatggcgtggcgcctacgtggctaatttgatttgttttcatctgacgtggcattgacgtggcgctgacgtggcaattagatttgaaaaaataataaaacccatgggacccatatgtcagtttcacatataaaataataataaatggtgggacccacgtgggccccacatgtcatatctatcctcttgtaacatcccggcctagggcttaataagattaatagaatactcatatcaacaagttgcaacttcttttccggaagccaatctccaaagaactccagggttaagcgtgcttagcctggagcaatttgggatggttcccgggtgcacacgagtgaggacaaagtgttgcagaaaagacatgtgttggtctgtgaggtttcacgggcgcgtgtgtcgcagttgcgcaggcatggtgcgcatggctggtgtagatcgggagtggttacacagcatggcacatgcgctgggtggccaagagaggacgttcctggcctggggttgatcgacgggggcgtcgatctctcttaagggggttaagcgtgcttggcctggagcaatttgggatgggtgaccgaccgggaaattcttcccgggtgcacacgagtgaggacaaagtgttgcagaaaagacatgtgttagtctgtgcccccgtcgatctctcttaagggggttaagcatgcttggcctggagcaatttgggatgggtgaccgaccgggaaattcttcccgggtgcacacgagtgaggacaaagtgttgcagaaaagacatgtgttagtctgtgagggcagtctatgagctataaaagctaccagatgtaagtgggcccggcctgggagaggcgggtcgttacacctcttcacctttcaccttcccctttaccctttctctctcgtgcatggcagcgacggcacgcgaggcggaggagggaggggcgcgggggtggtggcctgccggcggcggtcgcccctgccctggagcgacacgggggtggagaaagtttctcctcttatgtccacatctgtagagaagaggttaaatcaaggaaggttgcatcttgttcttgactgattaattggtgcgccataatctgcaggtaaactggttcttgcctgacacttgtcttgtccgggtggccaccgtggggcagcctggtgccatgagaaggatcaccgttcactacgtgaatttgctgccggtcgccggcgccggagaagcacacgtcgatggcgccgcgaattattccggcaaggtacgcacgacggattgattgttcgattgattggttgaccgacgagatgaattggttggtttggtttgttgggggactcgcagcagaggagcagtgtgatggagctcatccatcggtggtcgatggacatcaatgcctgggaggcgaaggagcggctggaccagaagctgaggaaccagatggaagccgtcatcaagaggtaactgatgatgcaaagatcaaatcatttgtttttttgaaaagaagaaagatggattgaaattttgctgaattgtttttcgtcgtttcgtttctgcaggcatcacagcacaggaagcatcaagctgaacagagccagcagtggaggggggagatcgacagtgacggcggcgatgggggtgcagagggcggtgtactcgaagaaaggggtgatgcggcggctgatgcggtggagtcgactgcggtgggacgcggcggagcaggcggagtgcacgtgtgcctagaggagttctccgccggcgacgccatggcccacctcccctacggccgccactttcactgggcctgcgcactccctggctcgaggctggcgccgcaccccgctcctgcccattctgccgcaccgtcgtcgacacgccggggaaggggaagtggaaggggaaggtgaaaggtgaagaggatagatatgacatgtggggcccacgtgggtcccaccatttattattattttatatgtgaaactgacatatgggtcccatgggttttattattttttcaaatctaattgacacatcagcgccacgtcaatgccacgtcagatgaagacaagtcaaattagccacgtaggcgccacgtcatccaaaaccgccatctaaaccgctgaaggacctaatctgcactggttttgatagttgagggacccgttgtatctggtttttcggttcaaggacgaaaatcggattcgttgacaagttaagagacctcagatgaacttattcccacatataatgacgggcccatttcatgttcgaaataggaagtttttggactatacaaagccgattttgctaaacatctcccgcgatttttttcctggcatttgatgtttttttggccacatgatctttgcaccaagatttgtgcagcaattgccgtggatgaggtcgacagggagtcaaggtgtgttggtattgccgtgtgaataaaatacgtgaagtatgtaattttcatatgtcaaattaagaaatatctctatgttaatttacatgtcaaattaagtactaatcgatacaacaaatttaacatatcttaaacatctaaataaaaattgatttctttaaccattgaaaaattaagatatttgaaactaaaataaaaaataaaaataaacttaaaattacagtcctatataactaaaattatatttgtaaatttagttgatttgacatgtaagtgcactgtaattttgataaaaataatgggtaagtaaatatgtacttattaaattctttaaaatataaaattacagtcttatataactaaaattacatttataaatttagttgatttgacatgtaagtgcactgtaatcttgataaaaataatatgtaagtaaatatgtacttattattttctttaaaatataaaattacagtcttatataactaaaattacatttgtaaatttagttgatttgaaatgtaagtgtactgtaattttgttaaaaataatatgtacgtaaatatgtacttattattttctttaaaatataaaattacagtcttatataactaaaattacatttgtaaatttagttgatttgacatgtaagtgcactgtaattttaataaaaatgttgtgtaagtaaatttgtattaattattttattttgtagtccgttggatgtaaatccaaggaaagaaaaaatctgggtgattttttctcaaaaatcacccgagtgatgtataggcagtcccatacaaagccactagtgtactactactgtatatatatatgagattctgacgatttccatgagaaaaccaggagattgtcctaccttactctgcgcgtgcaatacatccatcactcaatccatccaagtccagacattctggcaactaggcctagtcacgatcacgggaacctgactacaaatccagattcatcaaacacatcaaccagacgattctggattataattattttccgccgggccctggattataattatcgatacagcatcactgatcaggatcaggcattggcgcattgcctgttgttacagtaaaagaacagtaaaaccattggtgtacctgtaccggacgccgggcgagcaatggagagggttgctagttgctactgggctgtacagcagaaggcaggcagcgccacagcgcgcggcgtgtgtgcgaccccgcttcggcgcggcatgcaaagcctgcggcatcgtcgtggcaggggaggggagtggagaaggggggaccccgcctgcctcccggaaccatccaaatgcaaagttcaaaggccctgtagccagagcgcgcgtcgtagcgaaagccagagcgagagcgaggtggttctcgccatgcatgcgcgcgggggcggtcgcgtggggggcgacgacgtctcgcgcctgcaggccgcgcagctaagctgcagtccttgttgttgtggtcatcactcactcacgcatgcatatggctgggctgtggctagcgaacgacgacgagcgagctagggcggtttgccggtgtggtggccactgccgtggcatgaagtagtattcacctcgccgtggtttgatcctggctagctgtccgcctgatttttcacgtaatcaccaacctaacgttagaaaacgatatgaaaacaaacgataaaaaacaatatatcgttcacggaagagacgagatttaacgtagaaaacccttccaaagcaaaagagaaaaaaccacgagcgtcagccagtaaaatatcttcacaatatcggggtgaggttacaacaccgaacgacggcttacaagaggtatatatatgatatgaaattctaaaagggatgacgatccgtacctctgcttcgctctggcccagcctctggcatctactggcctccacttcacctttacactactagaaaacgcatttttcccaacgcaggggtctttttttcgcaggcggacatgattcttatagccaaatgaccgcctaaaaaatataaatcggggtgaagttcgctgtccgcctgcgagaatctattttcgcaggcggaccacttaagcggcgcattttcacaggcagactacttaagcggcgcctgcgaaaatagattttcgcaggcgaaccttatgtagtccgactgcaaaaatcgtacctacccaaaaaaaaaccccacccttatcttctcatcccacccctcccaccactcaactctctctctctctccttctccctccactgactcagtctcactgactctcctctccctcactgactctcctctcctctcatctccggcggcgcggcggggccgacgacggcgcggggcggcggcggcggcggcgcggggcgcgtggccggcggcgtctcccctcgccccctccctcctagatctggccggagggaggggggaggccagcgagggcgacggcggcaacgacggcgcggggcggctggcggcgtctcccctcgccccctccctcctagatctggccggaggagggaggggggggcggcgagggcgacggcgacgacgacggcggcgacggcgcacgtggtgcggcgtgggccggccggcggcgtctcccctccctccctccctcgcagatctggccggaggagggaggggggaggccaacggcggcgaggacggcgtggagcagcggcggcgacgacgacgacggcggcagcggcggcgacggcggcgacgacgacggcggcggcgacggcggcgacgacgacggcggcggcggctcccctcccctcccctctcagatccggccgggggaggggggcggtggcgaggcgcgtggcggcggcggtgcggcaattttttttgttcgtttttttgcattttcgcagacgggccgttgccccgactgcgaaaattatcgattttcacagtcgttgtgttgcaggcggacctccctcccgcctgcgaaaattagttttggccgcttgaaaaaattagtttttagtagtgttataaagtacaaataaatttggatcacaactcaacccctaacgcccggatcaaaccactgttcgattctttcttagccgaagttttgcgatgttggtgggctcgacggatgggagggcctgctttactggagacggccgggtgggcccctcctgcgctccggttaactgcgcccatgctatgtaggtttcggtggtgtggtggcgccatcgtttcccggtctggagaccggaactcaccacctccgtctcgctctcttatcccctcgtgtcgtccggccggggtccggccccgtggacaggttagtgtttacccactttgcgatccttttttctcgttctctttcgtcttttcgagcagcagcagccgcagccgcgcgcgtgacggggacgggccatcatgtgcatatccatcgttcgtgcgcgcatgatagatgcttctgcgtttgccggtgttgcgctgccccgtcttaatgcaaatatgcaatcataatgttcgcgtggatcatgattggttggttgattacaacgtgcactgcgggcacggcgtgctaccactgtacacgcgtacatcaatacaaagcgtttcccaaaccgccgggaccggggttacggcgccccggcggtaagcacggttaccacgcggtaaccgtgaaaaaccatgtaaaatttatcacaaatttaaattattttttaaatttatttaaatttaaggaggttaccgcggtatttatattgccgtaccccgcggtaaggccggtaaccgcgcggttaccgacggtaagggaaacccatacatatatcactcagatctacgagaggatctccgaaccgcgcgagatcagtgatcgattgagagttagatcgaaaagatgtgcagatgcttgagttcagtatatatattaaagcacaacacacgttatattataccgtaaaagttttccttcttttttgattgttgtgaattaatgcagtgtatatctatctatttaatctaataaaaatatgagggaaagtaggctggattgattccttggttcgtgcatgacagcggggaggtgaagaacatctcctgttctagatgcgaccaatttgatcctccgtgtcaatcatatatatcatttggtatgggccatgccacctcttctcctcagtcctctgcgtgtgctttagccggcaggctagcttgcgcgatgtggtccaaaactaaagacagcatccacatctcccacctcctaccttcggcagcgacgtttgccggtcggccggccgccggaggacggatgtcccttcaatctgatcgatcccctctccggcatcacagacgaatacagcgtattagatatttagataggcagctatcagctggctatagatcgatgctctttctgaagtccgagaaaatgaagtgcatgagtacatcgtctgtactggggtattaatttatcaaccccaaaccctgctgaccttcagtgagagagagagagagagagctgcagtagttgtgtccatggatgggagagagagcgagcatgggaacaaaagcatgtacaagccaggtatgcatgccgatccgcctgcgcttctctgcgtgcacactacggctggtgatgggagcgctggaaagctgaagacgcgagcctgcgctcaagactacttgtcgttgacatgaactgacagttcgtttgtttctttctacatgcagtgtcagtttatgtatggccattgtgctcagccactcggagaggatctacatatataggagtatatatcgatccaacctctatacggaaacttgcaggcagaatagctgtagtatcttttctttagctgtacaaaatatagttgtcgcatataaatagacagcacatgtaattttggtttacagtagatagcaatagcctaaagatatttgctagctaagatttaataaccttccaaatgagtcgtcagttgaaggatttcaacaattgagagccgcgccattgatatgtgcaattaacttaaccaatggaaattgatactccctccatcctataatataagggattttaagtttttgcttacactgtttgaccattcgtcttattcaaaaaaattttacaattattatttattttctttgtgacttactttattattccaagtactttaagcacaacttttcgtttttatatttgcacaaatttgttgaataagacgagtggtcaaacattgcaaacaaaaactcaaaatctcttatattataggacggagggagtaataaatatttatcatgttataacttataagaaattaaaccaaaactggcaacactggcaacaatgacggtattggtagctaaacacagacgaacaccatagaagatccaacctttatgatggtaccgaagcatgacatttgtgaatgaggtccagcagaagctagcctacatccctactggttataggcatatagcttaatcggccatcgactagcgtaattatagtgtatctgagtatcacacttctcttagatctagtacaattacgatgtatctgagtatctacgaccttcgaatagcttggctgtcgcccagtagtatctatacctatgctatagtcaccatgttaccatgcagttaaaacactacaacaaaacttgtaataggagacgcaattatatgtgtcggttcatctaaaacagcacatatgaggcttttcccgctttcccaacccctcatgtggatctaaaataaaaaaatcggcacctataacaccttataagtgccggtttattaaacaattgcgctttagggatggagctgagctgaacacatatttctctgtttttttaagtcttcctcagtctaaagtcctaatcttatgttctcccaaccaccccctctctctcatactccatccccattcgctctctccccacctcaccaagttggcgagcgatgcatgcaacgacgatggctcgtctctcttgctgacgtgacgacggtggttctactacctcggtgacggcccgcctattctcagcgatgccatggcagtgtcaggtcctcctcatgctgccgtcagacatggcctcggctccgtctactggatttgatggtgatggcgatagaattggcacctacgccaaattcagcgggcccaagctcaggggtctccgaatatggccccagtatcatctcatctaccgcaccaagaggggttgccataaccacatcgcctcggtggctaggtccccagatttgacctcaggcaacggcaagacgcaacgtcaatgctccactattgtaacgtcccgtcttcccccaggccgggcccacttacatctgatagctttcataggtcatagactgccctcacagaccaacacatgtcttttctgcacactttgtcctcactcgtgtgcacccggaagaatttcccggtcggtcacccatcccaaattgctccaggccaaaggccgggatgttacaccctcacccccttaagagagatcgacgcccccgtcgatcaaccctaggccaggaacgtcctctcttggctacgcccatgtgtccagtgccagcgcatgtgccatgctgtgtaaccactcccggtcttcaccagccatgcgcaccatgcctgcgcaactgcgacacacgcgccgcgagagtcggctctgataccattttgtaacgtcccgccttcccccagaccgggcccacttacatctgatagctttcataggtcatagactgccctcacagaccaacacatgtcttttctgcacactttgtcctcactcgtgtgcacccgggaagaatttcccggtcggtcacccatcccaaattgctccaggccaagcacgcttaaccctggagttctttggagattggcttccggaaaagaagttgcaacttgttgatatgagtattctattaattctattaagccctaggccgggatgttacaactatgaagagcttcaagggcctcgtgaggtaggactcctccttgaactggccccctccctgttgcggggattccctagcaacaacggcgaggacctcaactgctcaccatcatccagcaaccaggcccaaggcccgattacttcgtctccaggtggtgctctcctttgcgtttttgtcttgggatttctcgatttttgtggaaagggaaatgtatgggagtttgtgttctagggcctatgagttcttgttggatctgaatatgaactcttgtgtgcaatgtagctagcttattgttgttgatgtagggccttatatgtgatgaatgttcttgatttgtttttccatgaaatacaatggacgttcttgatttttctcccatggcttcttaatctatgccatggatgtggatatggggggatgtgctgctcgaagcatcggcacaattcatcgagccgactccctttttttttctccgtcataggcctcacatgtgttgttgtgcctgttttgaaatcgacaccaaaagcatggctcatcagtgccggttgcagaaaccagcacatatatggacttatagaccgacactgtaatagcaggcccttcggaactgcacaacccaacccatccaacagacgggcatacttacacatactatcccatttatactttcatcctcacttcgtgtaaaacggttaagccaagagtgacatggttggagagacaagctcttataagttggttctatacttgctaaactagcaagctggtattaaacatgcacacatagctctcatgcgacacgtaagtcttatcctaattgggtcaggatgtaccatacatacataaggccatgaaagactttagaacacgctaagttgttatgaatacctgaattcctagtttgggcttgtaaataatgaaatggcactaaatgtcttggtaatgagatatattatcgctattgggggagcggctttgccctcgtcctagggaggcagttgcccccttttcttctctcttttgtctctgtctgtgcatctcaagaccggcttcggacaaggggcccctaagaaagcctttggaggggctttggggaagaaagaggccccccgtaacccataaaaatgcctcggagaggggcaccctgaaggagcctacggggtggcttccccgacacggggctcccaaataaggcattccccacggtggggagatggcaacaacattgatggggcattcaaagggcaggctcaaccactcctgacatccacgaggaaaggccctaagcaatgtatacatttcgctctttttccttgtgctcgatccctattggattctattccaacataccctattgcactctttctccttgtgctcgatcccttttggattctgttccaacatacctccatttattaaatagatgacgtcattgacttttagacacacatttgatcatttataatattaattttttacataattataatttattttgcagcgagttattgtgccactaaaaagtattataaacatggtttatatcttatacatttgcatacaatttttaaattagatgaatggttaaatatgtgtccgaaagttaatgatggtctctattaataaatagaggaagtatatgctatgtaactttactttagcacacggcagtatataggaatctactgaaatgaattaaggtcatcacacacgaaatttcgattactgatcagtaccaaatggcagctgggatcacagattagattcagaacaattatactaattcagagtaattaaggatataaaccttcaataaatagaaatccttatttatatagatcaagtaacttgcactggaagcacaaatttcttaactgtaatagatcaagttatggtaaaaaaaacgtaagttatatacacacactcgcgcgtacaaaaattaattttcacccaagtaattaattcatcagagaatatatgcaggacttgagttgcatatatactccctccgtcatctaatataagggattttgacattttgcttgtcctgtttaaccattcgtcttatttaattttttttagaattattatttatttttacttattttattatccaaattactttaagcgcagcttttcgttttttatattttgcacaaatttttttaataagatgagtggtcaaatagtgcaagcaaaatatcaaaatcccttatattaagggacggagagggagtagttattattttcagtttttcaccctgataaataaaaaatgcagaatcatgatgggcaataatgcataatgcacatctcatgcaaacactgcggttgtcacaaaactaaaccacaattaacaccagtacacacacatgtacactaacccatatatttatcgatgcggttcgttagccatatgattcccctcgtaactagtaccacatgatcgactagtatgcagaatttaagtatatatatatatatataaataacgatgtcttgcttaattttgacacatagtagaatttaagtatgcagagtatagctagctagcacttagggcgctccctttgacatatactatgcaggaatggtaaaacacataaatagaaaaaaaacacaacattttgggacgaatgcatatgcaaaacggatgaatacacaaaacatatatatagaaacacggaaatgggcgtaaggtgtttgatagactcttccaattagaaaaacatatgatttagattagagagatatatagactcaatagaaatcggaaaactccaattcgtttcttaaaagattaggtaagaatactctataggattaaatcttaaaaaatttcttcacataccatttgtctcgagggaggtcttaaaagatgtttctgctgggtgctggttaagagagacagtttacacttttacagccgcctgccatctctgccatagtagttcaaaggcattgatcagataaggaagagtactcgtatatatatgcggctatatacgcgcgctgcccaggcaggcagcacgccaaatatgcccgtacctcactattactacacagtgaaaccagacgttgcagagcctgaagaaagccccccacttctctgactatctgaacatcacccatgcataagctcatcatcgccctcgctctcacagtcacatgcatgcatgtatgtgtgtacgtatatctgcagttatgcaatgtgtaactggcccatgcatatgtactatcagccagggagaacaggctcgatcttttaatgctactttaatttcattattttttttatatactgttgctatgtggatatatattgtacacatacctgtatcaatatatgcatcagtgcatgtgttccctccgtacgttttagttgcaaaaagaatagccaaagattaacattttgttttatattccaagtttcccatatttctcttctagatccctccaccatcctccatctttaattacaattttatacacacacacacacacacctatcattaactcattatgtatgcatgagatgatgagatattattgaggaatgctttgctagattatctaaattgaaagtacagttgtcttggtatatgcatttttaaatggcaaaatttgccacaggacatgcaaaaaatgtgtaattggttgtaggacaccggtcgcattattttattatttccgggtcaaaagaggtgagatatttttctaaatgcccagattgcccttctctttccttccttttctcttactctgtccttctttcccccttcttgttgatttcgccgggaacggcatagcagcctcaaagcagcggtggggcgaggtcggcgcggcgtggtgcggaatcaccagcggccggggcggtcgatggcatggcgcgaccatggaggagtggtgttcggccagatcgatagcgggcaggcgacgacagtgccggtgcggtggggcgcggccgggaggcagcaccaagcgtaggcggggaggctacgatgggtcccggcatcaccaccgctacgatggccagtgcccttgctcccttcggtgcgcttgacgagtgccgacgactgcggcgggttcagatcggcgccgacgaagaaggggtgcgatctccctctccggtgcaccatttttcggggtccttgaggggagatggagaggaggatgaggcgaagatgctggcgcgacagcttggcccggcttggtccagataagtgggaatgtcgatgatgtcgctgcggcggtgcgcaaagcacgctccagagctccggtgggcacaacagcattcccgtcgattggctgcacgaatcgagaggttgtcaaagcaagatttgatcggcatggagagaagataatagaacatgaattagataggaacggagatagctcgttggtgatcagcggcgtcctccttctcagcggccgacgacgaaagataggtggagagggagagctggagctctcttcctcggtttgctttgtgtggaaatgaagtggagtagatggtgatgcagtagggacgagatgaagactcgcctcagcattttgaggcgttgacacgtcgtgcacacgcgtcgaactcagccggcgccgatctctctctcggctgtctctggtcgatctctctcccatcgcgtgctagctcatgtcgcttggcccaacctcccccaaacacgacgagctgaggaggctattctccaggttcggcaagatcgagagggagaagaagataagggcaaaactgtcattttacattgtttctctctcatcaattgaccgaatattatattttaatgtgtccaatgtcctgtagcaaattaccacatttttggagtgtcctcgggcaaattcacgtctttagggtgttcaacagctaattacacattttttgagtgtcctgtagcaaattttgcctttttaaatttgtcaagggtgtatcacagagctttgtcaacatagatcaatcccacttaagtgccatacacatgcatgtcaatgagaaatcaatatgtgatctataaaaaaattctatattccaaatatatatactttcttgatttctcaagtgtaattagatatatttgtgcaacatgtcaatcagctctgtaatgaagtgtttgttctcaattaatctctactccctccgtccctaaatataagggattttggttggatgtggcatatcctagtataatgaatctggacaggagcttgtccagattcattgtattaggatatgtcacatccaaccaaaatcccttatatttagggatggagggagtatgtcccaaaataaattaacctagtacggaatgtgatatattttagtactacgaatctggacagctcataaaatgtatcacatcccgtactacgttaacttattttgggggcagaaggagtacgattcctcacatcaacaactccgcacaactaaaactaaccaaattttagcaatatatagtgcatgcatgtattgtagtatagatgtaattcatgagttaatatgaaaaaatataacatacataaaatatataactaacgactttagtgcgtcacttcccaattgtgagttatttttttaactgccgccttactagatagctagccctacattatgatgtcatctcagaaaaatcatagcaaaaaaaaaaggttttcgaatagactatatatatgttagacacaacgtaaaactttcaacatcttgttgttttcttgtggactttaagtaccttcattttttttacaattaattgtaccttcttgatcaatatatatttgcttgttaactaatctaatgattaattagaaatacatgcatgcataggcgttcccatattatagtattgattaccacgtgaacataaaagtggaattgctagatttcaagtgcctaaaatttcacatatagtacctaaaattaattgcagtgctatgcaaaatgcgatttaggttcattttaactacattatgttgttatatatatggtttgaattcatttttgtctatatatgtttgaattttctttcatgtatcttaatttgtaatgttttatgagttatatgaatttatttgtatttttgtatttttttcttgtttgttagaataatttattgttcaaccattgggtagttgtaagtaccactaagtaacaggaatgtaatggaaccattggattattatctaacaagggacgataaaagtgagtggactttttgaaaatttcaggcgcctaaaatctagacactcacgaaaaaaataattacacaagggcatgatgatttactaacacatcttgatatgttgttgatcatatgtaaccataatcaactcatgatcactcatcatgtatatccaaaatatttggccttttagccctgtcgtaggttttaatttgcctagtagtactggccatattatatatctacatcttcatataaaatagctcactagcaagataagtatatatatggacaggaatagagctagacaccataagttgccatttcatcctggtaaccgggctatatatgtaatatggatatttgtcaccttcacaaatacaattattgtgtcaatcagtaatatgctataaattcattggagtctgttgtggaccctaattacaactgaacaatatatagaagtgcatgttactatgcagcctatttaaacttaaatggggagaaataaattaagatagagttaataaactagggagaaacatatatatataaggagactgaaagcaaaaaaggaaaataattgggcttagtgggactaatgcccattgaaagaagcaagaatcaccctaaaaaacaaagaaagaagcaagaatcaattggaaagaggtaagaactatatattttcactcaaacaaaagctaattaaactatatgcgtacggaaaatatatgtctagatataccatggtatgataaccttgctggaaatgaagatatataagatcaatgttctgatccgctcgatctcaatttgcaaaatattggtcatttcagtatacagattcacggaacaagaaataattaagctatgttttgactatagatactcagatttatatacttgatataattatgttccaaggaattaattagttctctgggagattggcaacactgtcaatctatggagaaactttgttcagcataactggggggggataagagatgtaatagaagcttatttatgaaagaattaatggatcaaattagacatctattttcatcatgtatattactatatatattaattacctattattctcaatctagatcatatatatcattagatatagagatagtaaactagagtttatattagaacttaagaaaacgagcaagactagctacatgtaaagttttcatgctaggtgatgcagataataattaagaaaaagacgttctaatttcaggcaagatgctacattttaatttctgtgcttagctactcaagaatagtacctgtagtccttaattagtaattcagacttttcaattcacaggatagataggaccaaccggcaaactctcatcctagctagatggatgttcatagcctatacgaagatcctcaaaaagaagctaggcagattccctcaaaggcatgctaactgcaccctaggagagaaaacttaaccatgagctatcaaattgcagccaccatctagagggtatatacatgcacacatatagcatggactgagcttgggaagcaaaaactgaagcaaagcagaagaaagaataagcagacgacagttacatgtaccaacacacctcccattcgtcccccttttgttttgcgaaggagatagtagaagactttcctttctcttttcaacttcccataacgtactccctctccctttcccctttcccctttcccaatcttacaaatggaccaaaatgtactcccttgcaagctagctatcctcatcagcatcaatcaatccatctctattctctgaattccaaacccttccagtgcaaaacaaaaaccgaaatgcatgcgcctactctcttactacagatgattgctagttatatatcgacaatgcatatgcatctatatatctagccaaggccggctcatgtcctcccttttgctcccatcactctctgaacacacccacaccgtgcaggccagtagtcctagctagctacactacactacacttgatgacttgatcagtgaaaaggaaaaggggagagagagagagagagagagagagagagagagagagcatataggggagctgagatcaaaacagcacaagcgcacagccaagaacggaagcagctaagctagctagcagccgcagcacaacgacagccaacaagtgtacacctcctcactgtttgctactcccaaatcaacagtgatcgctcgtactcgccccataaattctcctagcgggacgtacaaggaagttatggccagtgagtgccactgcatatattgtggcaatattgccccctctttacagactgccacggccataaagatctcgtggactggtatactgttcgcgctcaaggcccagacaatccaaactatacgtaatctgtcccactgccatcagtaaattttccagtgtaccccgctaatcagcaacagaattatgcgtaatctggtccaccctgcatcacttaattcagtgtcccccgttaatcagcaacagaaaaatttaagacatggaaaactcaacaccgtactggatatgccagtagtatatatatcccccatatgctgctactagtagctagctcagtactacactctataccatgacgttacttatacagatatcatacatccatgatatatatacatgcagaagagagcgacagtactactgccactgtagcaggggaaaaagcggcggcaaagagggggaaaaatatatagaagaggaatgtacgttcacgacgactttcactgtaaatactgaaattatggtacagtgaatggaagagaattttgagatctaacctgcaattgttgctctctggagttgtttgttgtcgatcgatgcatggttattaacgcgccgtccaaacgttggggtcgagatcgatgcgatcgattggatacagcatatcgcacacatatgatgtgcaagcgaagtgaggcagccaggcactgcttgcttgcttgctttgtgttcgtccatggatatatgttcaaatcttggcagatgttaggagagattatataaagaattttgcagatgtatgttatcatatgtaggaaatgggcttgtgtttatggtaacaaatcattggacagaagtaatcgagcaagaatggaatgtaatagaacaaagcaaaggaagagctcaagctcatcacacggatttggggaaaactttcaagtttcctaataattctctatatcttctcaaaccaacagaaagattccaattaagtggccaacaaaacaaaaatgtcaaatcctaatgctgtcatcaaatttcaggttataatggaatcacaagagaaagtgagatcgatgttgctgcgagaagaagaacaaaccaaatcaaaacagaagaagaaaaaagaatcgttgatgaactttcctttgtttttctctctttaggtcgctacagatcgagatccaaggccgaatgcgcgtccctcttggaggaagacgacgacgacggagacgatgcagcggacgactcggcgccatggtggtggtgaggaggcaattccagcagccgcagtgttggatccctcctcatccacgcgggcgtctgcaatgacagtgcattgccatgattgctcgactcgccggcggcggcgccgccgccgccgccggcatgcgggttgtcgaggttcacgccgaacagccgcacgcgcttcgcggccgtcgtggggctctcgatgaccggaaccgagtcgagcaccaccggtgagcccgccgcccttacaccatcgccgctcggctgcagcgtgtagtggtggtgcagcggcgacggcgcgcgcgccagcagtggtgcttgcggaggaatcctcgccgagccgaacaggaggacctgcctccccatcgcggcggcggggttgaaggcgcggaagtcgaggccttgcctgaggcggtgctcgtagagcgtggccggcggcgagggctgcacgaagaatccccctccgccgccgatcccccacggggcgtagtgcgacgtgagcggcatcgggagcggcagcccgcggggcagccggagcgggtcgcgggtgtcggcgcggcgcttccagtcgatgaagaggcggtgccgcgccgcctcgtcgccgatgccgcgggagaaggagacggtgtccccggcgtcgaggcgcttctccttgacgaagcggctccaccccttggtcatcacgtagctctggctgctgttccagtaggagtagcggaaccgccatggcttccccgcgcggtcctcgaagttgagcaggaggcccttctcgttcgccgccgcgtccagcgggaagtacttctcggcgtactgcttcgggatcaccagccggttcagcttcccaacgtcgctcggcgtcaccaccttgtcgaacatgtgctccttctccaccacctccgcttctccgccgccgccgccgccgccgccgctcccagacgccccggcgccatcgtcggagcgaaagggagtgctgctccctgacgcagacgccgacgccgacgcggaagccgcgtgatgagcaggagacgacgacgacgacgtgggcgcaggcgcggcttcggccgtggccgtcatgaaggggatctctcgccttcccgcctcatcctgctcctcgtcctcctcttctttagaaaacctactgcttgtagtgaactccatagaaaactatcactatttcctcaaattcttggctgtatttcttgctcctctctcccaactcctccttcttcttcttccttcttcctcctctgcaagatgttcgaggataggcactgttacaaagaagtaagctataggatactagagagggggatatgatctacctatgtatgcgtgtatgtattgtattgttgttcctatgaattcctattgatctcgagctgtgtttggaggaagcaagccaagctctagctagggagagggagaagagcagagagaggaggaatcagagcggtttgcattgagtcttgtgcgcttctaagctatggggaattggggatatggtgggaagagagagagagaaagtgaccatggaattggatgtagatcggtggttcttactggttatactactgacactgtcatcgaatacgtcactccgtcattttctttctccattttttttgttcccaaatacaaggcattcataagttcaaatacttcgatgccattttcatccgtacaaatgatcccaggaaatgtctgcacgtgcatattttagtaagatattggaaactattttgatatgattattcctcgatgggttgtcctctcatttgcttaaaaaccatccaaatagttatgaaaaattctagaaaaatttgataaaaataaaaatttggcaaattaaggtcccttcaaaaataaaaatttttttgtggtacttaaagaaaggtgtcattcttactaaagataatttagctaggaggaattggcatggtgatttaaaatgcgctttctgtcatcagcctgagtcaattcaacacctgttttttgattgctatattgccaagttcttgtggcgagcggttcatattttgtttggtataagtaccccatcaaacttagttgagttattccaacagtggtctaaggggggtaataaaaaacaaaatactttactgttaactgcagcagcagcgcttttctggacagtttggttaacaagaaacgagttagtgtttgacaattacggaccgaaatcttttttgcaggtactattcaggggtacgcattggttacgccaatgggcgaagctgcaacggcatgaggatctgcgttcacagttgatcgcggcatcgcaacatcttgagtcatcagctttgcaattttttagttccaatggatggttatcagctagacacatcggtctttagtcgtctgaacttttatctcggttttgtttccaagtgttactctgtaagaacgtttgttataattggcatgagtctatcttttgatagatgaagccgggtataaaatatccattatctaaaaagaaaaatttgataacactcatgccacatatctatataacttaataaaattttaggtccaaactgatcaactcactagtcgagatataaaaaacaaattcaacgtatgaatagtgacatactgttcactatatatactttatattatcactttttgaaaaaaaatcgtaacacagtttgtatttaatttaaaagaaaaaggtatacaaagggatatcccttcgaaggattagaatccactctctcagatatttaaccaatattttctaatgatgagatttttttctagacaccacaactgtgtgtggtagcatttgtatttttatgacttaattattcgtcgctgatgtcgtggggtctaataaggagaggacaaaatgaaactactgttctagtttctttcgatctaaaatatagttaactttatatatatatatacactctctccatcctaaattatagggcgatctctttttaagaaaaattaaactcggtaacttttgactaataattatactaatcatatttatgctaagtattatgcatgctatattaatatatttatattttaaagtactttcatgtgatgctaatttcatatttgttagtaacataatatggaataaattaattgtcaaaatatgtcattgaagaccgtgtaaaaaaatatatggcttataatttaggacggaggaagtatgttattttcgaaacttaattgcgaagttgtacatttattttctttttctctctttgtgaaagaagatgtaggtgtagaggtggagaccggagaaagagctagaaaagtggggtgtactgtaccgtgtagtttcttagctttataaaggggttgagatggattgagggagagaggtggagcctatgaatttctctgagttgggctcatgtgagcttgtccttgtcaccatacgggtatcaaatatcacacgcctgcctatatagctgctaagctacccaaaggatatagcttgattgcgtagagtgtagacctggttcctaggttgggcctcctggtactcatcaaggggattttgtcatttatatatgttcatgtcttgaaaaagatttgtgataattgtatgatatgatgtggaatgagaagaccgcagtgtatatatgcctcaaaaaaaataaaacagctagcttgacttaattaattaatatgttcagcaatatatagtactgagtatgtatctatacgttcaagagaacttactagtataacctaaaatcaatatatattggaaaaagtccaaataccctcctaaactttagatggtagtccgtctaacaccctaaactttaaaaccgggcatccatcccctcgaactttgccataccatccatatatattacccctaatgtggttttggacgatggttttgtatatcttgaaagcttaaacaaacaattttaaataactaatataacatatttgcatatcatcagttataaataatcaatttatttttatatagtgatatcatactattattatggtggtactcgtttgtaagttggagctaataaggagcaaaaaagaaatatctaagtaaaaattttaatatatatgtccaaagtgtatggcatgtgattaaactcatccaacttatatacaaattagataaaaaccactatgcaaaaccatcttagggggttttacaaacggtgttgtaaagtttacggggctgaatgtccggtttcaaagttgatggtgctagatggactttcatccaaagtttagggcctttttttttgacttttgccatatatatttgcatattgatgtcatgaaaatctcaaagattttctacatgaagtatatgcaatattacccccaaacaataaggtcacttacataatatgtatgcaagctttgatgctcatatataaagttactatgatttccccaaatgcaagttccctagccattggatctcaacgtaagaactcaccgatgtctgacggtgcgacctgaacttcagaaagcatgccaaattgaggtctctagggttggaggggcgacgacgtacagatccaacgtcacaataagtgcactagagttgcaggaagacaagaggagcggagcaaaattattgagaaagcggagcaaaattttattatgacattaatctattaatggtttgcatatactctattttggaaagctttacacatgttatgttcaagcaaatactttagtctagatttctacaaaaaaaatgacgttttattttacataaaaactactccatttggtcaaaatatatatattttttgaaaattcttacaataaacataagttaattttgaacgttgttattatttttatgcaagttgtaggtatatgcaaatgacatagttaagttttatataaataagaaaaacattcatgatactccatgcatgtttataactattttttatttatgcaaaagaaataagtggtcaaaattgtatatcttataaacttctaaaagtataattaaaaaaacatcttttggggtataaccggaggaattatgttatatactggtctaaatgtcttgcatatccttcctattgcttaggttgcaatttattaatttccggataattggtgctaattaagctgtagcttggtcgttagtgcagcaaatataggtccacatcagttaattagtagtgggctgaaccatgcttatacgcgaatatttttcagcttcttgttccattcttattggccgactacaatttcccccttttcgtccaccatatgtatataaacaggttgaaatttccctaatggtagtcagtagtagtagaatttggttctcatttggccatctctctggtcaaaaactacctttaactgatccgtacgtataaggtgagcaggtttttctcagtagtcaccaagttgaagatctgctgctgatgactgatgtgatgaggcatctttccaaaccgacaaaaccctaacgatacacactagtgtggctagaaaggcaggtgcgttcccacttgtgcaatacgcgtgccttcgcatgtgtggagagacaaaagttgagggggaaatgggaggcagatcagcacaaggctagctaggagaagagagatcagtgagagagatggttggccgagttcaagatatctatatatcgatctagctagctcctggaccgcatatatgcagctctccccgaaactttaattattcgtagaatcgtagtatatcagtacaactgttcaacatgcctatcttattaagagttgagcagagcagagacagtggtagatatgtaacatgcttctcagatggttttgatttgatatgcatatgtcaagggagcatgtgactctctgggtgcccacttctctcactcttgctactacatggaatttaataatttgtggctaaggttagtatctaattatcaagaaaaggatctgtaggatcgaatcacaagaactaagccaaccagaggaggggtgaatggttggtatacccaaaaaccaaaaacttttagcggaaataaaagttaccctcgaaatcgacggagatcggtctgaccgagattgatctgtcggtctgaccgagtggatgccgccgatctgaccgatgtagaatgatcggtcgaactgccaaagtcgcctgccgctcgctgtcgccgccgccggtctgaccgccacaatgccatcggtctgaccgccggtgagttgccggttagaccgccgaaacccggtgaaacacaaatcgaagaactcttaaagtagataacaactttattgcttctctctgtgtttacaaagtgcaccaacagcactccttacaaaaatttcgactaaactcgaaaccctgactaaactagcaactcaattgctctcaaaagcgatacaaaaacgataccgggaagcctcacgctccccctctatttatacatgaggtaggcagcctaaagccacgaaccaaactcatactaagagtcctaaacaccttaggaaatcctctagtacaagatacaaactttacataaccaattgtaccaaatttggactccttccaaattcgactccgcatcccatacgcacacaatacctccatcgtatgccatatagaatcttcaccaaccacgtgcatcaactctagccttagtatcccgcatgatatctgaccaccacggacatcgtcttaccaccaagccgactcccggttcatcaccgcaaatactctcccgaggcatcgagtcacctacacatgaaacaaacaaagaaaccatattccgagaccaagctatcaccaacttgactcattgttagcaaacaacagtattacatacgtatagtatccatctagaagccataaccatgaaacaatcacggatatccaaagaaacaacccgaaaccgaaaccgacacagcgtcggccggtcagaccgcgggccggccggtctgaccgctagatcaccgccggtctgaccggcatacacagcccggtcagaccggtcacataaaataacagtgaatctgatcatcacctgaaaattgattatctccaaaaccacttcgacgataatctccaaatatcaaaaccaataatcacagatgccaattgttcatcacagaataaaaatcaaaacacacattgatcttacatgatcttcacgtgccttagtctgacatcatttgtgtaagcaaacacttgttttcagctggctctgttgaagggaaaaacattaaacaaagccaacacgtgttattcctattatatcggtcaatgatatacctatcttatcttgttagagtttcacatgagggtttgaaagcatccgcgttcaagtactacctctgtcccaatatatatagcaatctattatcggatgagatatatcatagtacaacgaatctggatatatctcatgttcagattcatagaactaggatatgtcttattcagtatcacgttgttatattttgggttgaaaagagtagaaattactattcaacaatactaagtttattatgtaaaaccaagtaaaaattaaaaaagggagtgtgtccatctttctcttgaaaactagctaaatcttagtcactattagctctaaattcagtcatcctcctcgtccctatataacccacaatcctatggtcaaatcctgatgtttcccgttactattagctctaattaaattcattgtcagtttgtcacccccgccccataacatacgctggctgaccaccacagtatgtgtgatgtctactaggcttcccacagagctgatgcattgcccatgtggaatgccatcgcactttttcatcctcttagctgtcttagctttcaccttgtaccatttggattaatttggtctccagtctcattttaatttagggtgtactattggtgaggtggtggacatccactagttcaaattttgttgtccacaaatattgttgtgtttatctttagttgtaaccaagagactagtatttacattgcttaaaaaaaatcccaggtgcacacgaacccctgaagattaactttgctttaattctgactccaacttccaccgcgccatctaccatattacccaaatgggatgatgttgaaatgagaacgtatcacaaacgagataacattgaaagccaacaaaaaattagtgacttttttctgggtcattaattgctgaatattctagcatataaaagaaattattatataccaagaaaacatgaattaattacatagaaataatgttaatatattttaagtatgcgacacgatcaacaacattttttttcttgtcaacattgtctattaaagtttgtgtcaaatatgtgtacgtgatcagttacagtttaggacttggagttgtactaggtataggaatagagtaagaatcggactctatcctggaaactctcttaaatagagggacatatctgttgtaaccgtaagacgacaatagcataggtgtgtgggtacgactagccgacgacctagcaggtggagggtcgtggatacctggatacactgtaatatgctagatcggggagaggagcgcccgtaattagtgtcctggagatgtaggcctcgactgaactccgttattaaatatcatgtctcggtatcatcattatgtttagatgttctatgacgttttctttcacgatttggtttccgatgtgatttcggggccggttttataacattatcacgcatatcctgtgttctagactagtaacagttaagactgcccttgcccagcaatcagatacattaattaattacggtttacacttgccaagagcccaactgatattaataatgtgcttatgcagtacatgtaagacaaaattttcgtcctatctatcatgcttcgtaatagtagcagccttaatttattggtaccccatacaatttaggaaactatacgagtgctctggctatggatctagacctagtacgcagttcctgtacaccttaattggcatgtatgtgtactgtagcccatgtaatctggtacatagtttttatgatttatttcagccgtcagccggcagccggtcctactctgtcaggttaagtctgataagatcctaacacgatgctgacctgccggctttgtttgcctgtcaccgccatggatatctcaatagtcctataaagataatgtagttcaaaaaaagaagggagaaacaaatatatctctggcgcttggaatcaaaacgactgaagaagtacttcaggtttttcagtgcctggcaagtactccagaataaatcaaacagagcaaattgtaactataaccttcgcgcagcagatatatgttttttataaatccaatttcatcctataacctgttttaatcaagaggtagtactactttgtttttttaaaacaaaaaggcaatccagggctgaaaaaaaaacatgcatcgccatggacacgaactgaagaaagaacagcaggcgactgtctcggttgtagttaatcattattgcctctgcataatattcccggccgcttaaattagcaagtgaacttgagcatctagctgacaaggcgcttatatatatatggtcccaggagcatgcgagctccaacgtaccaaaaatggaggggcaacgactctgactgaatgcatggccagtctggttagatgatgatctagattaaaaggtgtatacaagtgtcgtctctttaacaacaaccatagcagctagaagcagatgattattaaatggtgatcatgtggcttgcttttgtaacgataaaaaccatagcagtactggctgtaacctctttacatagcaggcggcacgtccatttcgtttttccgtcgtcagtgggtgtgcaatctcttgcattgacctgcacggtctaccacagcttcgatcgatcgatggtttgatgagatgtttagctagtgaaattggctttggcagatgccgctacctttgtaattctttattattattattctttgaacattttctaataacattttgaaaagaaataatcatcatgtaacttatacggaaaagaagcgagcaactttcggtgtcggcttatatatgtagtttttgcaataggcacacgcacgtgaccgctatttgcatcatgccttattggtttgggacgaaaccaagcgagacatgtaatagatgaatgaagcaactacaacccagttggaaggtcaaaatctgtaattttgaagttgcaaaacctaacttcgaagttagatcgagtactgttatagccatttgggctgtgttcgagatatggtggtttattaatatataattaattaaatattagctaaaaataacttgaaaatatattaatatgaattttaaagcaacttttgtgtagaaaattttattaaaaatataccgtttagcagttttaaaagtgtgtacgtataaaacgagagtggtgtgttgaaaagtgaagaaagaattcagccttagttgatactcccggatgtgtgaacttttgataactcctccttaaacgtatgtgtgaacttttgattactcctccttaaatgtgataatgggggcgtggtaagggtttggacatgccataataaccttgtgaaagggatgaaaacgatgttgcggtagtaaactggtgtcatcgtggctggtactgtagctaaaaggtctatttttttaagaaaaaacaatatgatggatttattacaaaattctggaaattcgaatccttgtcttgtttgagtgttcgctgctagttttaatcaaagagaacgtctaattttaaatactaacatattcaatgtaacagcgaaagatggtactaaaaaattcggcgtaacattttataagaaagcaaaaggctgacaaaaattgtacgaaatttacactatagtagtagctatctagagtggggataacaggcgaggattcgaatcccatgaagttaatggaggtaaagtgcagttctgcacatacattaaatccagcatcaagtggtccgagaatttcttcagaaagaattctgcatcatgcactcaacaaagtcctatgtacccctatgttcgaatcaggaagagaaaacggcgctaattaacatgatatatatgtacgatttgcttaaacacaggtagagggggaaacaaattaaatacgaaacagtgccaggacagggagaggaacggcacaacacaactgtactaacacaaattagtgtgttcaagggtattgcagcactattgtgttttttggctgccacaaattaacttccctactgtacctgtagatctgagatgtttggtttagattaactatggctaaaacgcactgaagacacacaccgtactgttcatttcggcttttgctcatgcaacgacagaggatatgtttccctccatgcatggctccataatagagtactgtaggggaccgaaccaagaaaacaaaaacagagcactatctgttcgcattgccataatccatgtaaagttgttcgataatcagactagaaacagttgtcgcatattttataaaaacgacaaaattatatatatgatactaaaaaagttaagtatatatactagttaccgacctgtatatgtgtggactatgatatattatatttaaccaaatgctggctatttttaaattatactagttggctaaaccaaaagtaaattaagtccatatatacatagttaaaacttgctaactattagtttgaatttcaaaaccaaattataaaggactaaactgagtttccactatgggtataactatatttctgttaactctgaaacttttagaattattagatattagaaaaactaaaaatatgtagtctttaatatcttcaatggcatgcttttatttaatatcgatccatgatacatatgaattacttaaattagtagccagatctttctacttaacatgagaacttacattgagcttataattaacgctgtggcagatagatcaacatgcttgattctcttgatgagtactccctccgtcaaaaaaaacctaatctagttgggaatgacagtacctaactaggttaattagggtttttttttatagtgaaaataactacttgtattattttcatctggccaacgagtgcatatagatattttaacatataataggcgaatagttaatcgcagttttgtctccgtcgcacgaaactaaatcgaggtcttatttttttaaaatagaaaatttactatattgactggagatttgattgaaattttgaacgaaaccaaatgttgggagctgggacaagcatagtccccacaattaaatcaaatcaacactcatcctggtgatgagttaaactggggcatttatacacagggacctagctatggcaaaggatataaccataggccgctcttgatgcgcactaaaccgctggcagagattcttctctatatgctcaactatcccctgcatatgtatatatttttgcagtacaagctagggttcttttaggctgtacttccctggtaataaaaactctaagctggctaaacagtccaggtaaacggcgacgatgctcataaattgtgtcatatatacgcgtcgttcaaaggtgagtttctggaccacacacactagctactgcaggatactatgcacggtttcgttaataacagtgccacagctacagggacgaacgatcgtcagggcagattaaaggagcacaggtggtgataattcaaacacttgctgccatgcatgcatgatcccgtaagctagctagcgtggaatagtaaaaggggaatggatcattagagcacagagttaggtctctgaacactgcagaaacttaatgctggttgggcctgaacccccaaaatattccaaagtcgctgttgcgtttcaccatcgcctccaagctagtagtaacaatcacacaagaacagcagtccacttgtctatagcgatatccatctagggatgactatgcacagtatataaacatgtatatatattgtgctacacaacctaacacatgcgtatcgatcgatctgtacgcatgcatatgcatctcaccttggaaattaattagtaccattattttcaaagccctgctactctacagcaatagaatgcacacatgagatacagcataacagcaagatcagtagtaggacgcatggatgcaacatatgcatggatcaagagccctttttctggttttctccttagcgtcaaactgtcaatcaagctgaaatggagcgcgtgcgcgtgcgtgaatgcatggcatggcacgcactctcacacggaacaaattctttgcctttgtgcagcggcccgcgcgcgcgcgcgcacacacacactactacaccaaagcacgctgcatgcatgcagcatgcataaaatggatgcatggtcgagtatcatttgaactttttgcatgggcaaatctcaagcttacacgtcttttgcagtagggaacacatgactttaaagggcccaaattttgctgcctggctgcccggccagcctttgctccaagtaccaccactactactacaacaacaatacaacaaccaagtctcatgttgacgcacacatacacgctgctggcctcactacccaccagccagagagtgaggaaaagactgttttgtgtgtgtgagatcgagagagagagagagagagagatagctggccggccgggtgtggtccagggaagaagaggtgtcagtgacagtgagctagctagctgggggtgatggtgcatggcatggcactgctcacattcatgtcgacacacacagatcgatgcatgcacgcgactatgttctgatcaaccggggagtaccacctttcagccccaaaatcaacggtgatacttcagtcctacagtagctagcacccaaccacgtacatactgattgatggctccatgcacacacacacactagacactactatagctgatcgatcgagacgtataggtgtgtgtaccgtgtatcggtgtatgtgtaggagtagctcgatgtgcatggcgagtagtatgtgtaatttgccgcgtccggccgtatgaccgtatatcgcttgtttggttggcaccgtacgtacgtacaagtacgtcgcatggagttagtgttatggatacggacgtacactgtacgattatctcatgttgtgtcgctgcaagtacgtaccatggggttgatatatacctggcgatacgctggtgtagcgtacaccgttacatctgtacaagcatgcagctactagcttctagctagctcgatctcacatttactggcgccatgaatgtggtagtcgtagtagtagtaagaacagcagcagctgcaggggtacatggccatctcacacagatctgcagaggcttctaattccacacctgacacatgcatcatgatgttcaatcttttccctctccccactgttggccggtagaggccgaagacctgcaactgaaagcaattaagcgagcacacctagagagagagagtgtgagagagagagaggagcatgcatgggcattgtcattgggacgcagtggcagaaaggaaagataaaactgatggagaggccaaagagatgggcagccttttgctatcgtagaacatgcaaaacaaaaggccccttctttttcagagagcggcagaaggaaggcaggcagggcaggggggggggggggggcgcttcgctttccatttccacgcagcccaaaagaggtctcggtttcttctcatctcatcgatctcggtttctccctagctcgatcatcagctgccccatgcttcctctccctctctaccggtcgagtagcttcttgttgcattgcgtgatgctacctgcaaactgcattgcgctatctcccctggcatattcatatcgctcgtaacgtagatcagctggcattaatttgcacaaatgcagtactactacatgcatgggatcaccggccggcacaagtcattgcagtaactactggcacatgggactgtacatgtgcccgcagcatatatgcatgatttgatttttcaaaaagatgcacgagtacgtgctcgcctaaacgatcgcgactctaattcatggcattgtacagatcgagcgcgctcgacatatgtaagataaatacaagttatgcactgcaatcgccatgagctagtagtgtagttctgaactccctgatcttatatcgcctaatataagtttataaccctcatctcgatctctctacgtccgtacatcgcaaagtgtatattgattaatgaactgccaggcacgcaggtttcgaggggttatgtaacgacacgctagctgcaatacagtacaggtacatactccatcagctcacatacaggtagtacgagatggcatgcatgcgggagttagcggcgtcgctagctggactggccggctagccacctctctcttagcagcaacagagcaacaggctagtcgcgcagtgagcactcactgagctccgcatggcacctgctactctgctagctgagctgccgctactcctccaagctgcatcatgcgggcggaggcccacgcctccgcgacccaagtaagacacgcacatgatcgacatgccgcgcgctgggccacgcatctctctccaccccatctctaccggcgactaggtacgtactactgttcaactgtatgccacgccgtcgtcgctctgaggctgagactctctctctctctctctctctctctctgatctatctctcactccaaacagtgcctgcttgacgactccggccaacagacaggcctggctggggtacatggggcatgcagggcattcatgcttccaagccatctcgttaatgcgaggcctatggactttaaccagcccatcactggactcgattggtggtccaaactcctcctcctcctcattatcagcatcccctcgattatttggttccatatcgtttgctaagaattttttttttcggaatggttaggtggccggaaggacttttttgggttgtttgaaacatgcataccttgatgatttcaattagcatgatcctcaaaaataatgttcctgtaataattaatcatctcttgatttttcagtaaagaaaaatcacgttgaatatgtggttcagattttggattgtggtgtcggatatggattatgtaagatctctctagtttgctgtttcatgttacgggggaaacaaatttggtgtggtgagggagttgtaggcatcagagttgaaatccttgtgcatctataaatgatacaggaaatgaatgttatatattttcactgccttaaataaagtttcctacgatgactccaacacattcaccaccttatatatgtagtgcactagtacaaaaaaatgtttttgcatgcatgcggtcagaatcgatcttcacaagggcctaggcggcccgcctgtacgtaggtgtctacagaattcaatattttcacgtgcgggcgatccaacagcttgcgaaaatctattatcgatcgtaggcggttgcctctcatttttcacagattgtcagatgttgtgttttttttcacagattatttcactttagagtttgcctctcgtttttatctacaaatttagtcgctaaatttcacataaccgaaaaatcacatgatcaaagttgaaataagttttattcgcaaaataaagttgaagtaacaataagtttgattgtatgttttcaaaagcattgattgaatggatatatggccagggtgaaatagatcgatcagtatatggcctgtaagggtgcgttcgttctgggggattgggtgagaaaggtacatagtattccgcacgcacgcttcccaaactactaaacggtgtattttttgtaaaaattttctatagaaaagttgctttaaaaatcatattaatccatttttgaaatttaaaatagttaatacttaattaattatacgctaatggctcacctcgttttacgtatcttcccaatcttctcgatccccctctcctcaaactcaccctaagtcaagctcatatataatcctttgggtcccacacgcagccttgcatgcatgcttagtgaccacggtattacgcctgccgcagcctgcagctagccaacctgcacctccggacttacttggcgcatgtgagtagaaccatccaaccagaagccaacaagctgcattaagggccgggtaaggcacgcgcgcagcgcgctcaatcttgcacggcaagggaaggatcagacgagagagacgacagctgagagagacgcgtacgtgttggtcgttgagggcgagagaatcagagaaagcaaacggatccggtataatacggtctgtgctttgtgtagcatcacaactggattgagagaaagaggacggacgacgcataaagccaccgatcgatcttgccgtctttggggcccccggcctctctctatcatatatatgatgtacactagaaaaatatccgtacgttacaacaggtgaaggttattttaattttattattgttatatacgttttagtttaggtgaaatctactgtgagaactcgtttgaatatatattttatccaacttcctttcgtgttgatttggtgtttttcatcatctgaatttgaaaatttagagttctaatttgggaacttttgaaatggaggtttcatatttggctcgtgggtttgattgcttgtggttgtcagccttgcgtggtttacacaggatacggaagacgcatgctcgacgcgaggtggtggaatcggacagcacgagcgcgtgcgacgatggaccaaaaaaaatctacggaagccaaatttaaattcagtttaatttatttattactacatccatactaatcaaaatataaaaagttttatagttggacacaagtattaagaaaacttgtgaaattaaataggaacaaattctaaaggctaaaattattaaattttgagacagagaaaataccaaatagcatactctatggccaatcacaattagaagattatgggctgatacgttacttgggctgaggcccaggcaggcattgaggacgtcagccccttcgctgtccgtctcgcctgcaatacctgtctaatctttttttttcttctcactaataaacgaaacggctaaacagaataaacgaaaccgcaaaacagaaacagaattggattagaaagacgtacgaaaatttgtggcaaaaatatctttaatttttataataggtaaagatatgggatgctatacacagatcgcggtcgatcgatagtgagggtgcaaatcgtgcatactacgccgtattatcgcatgatagtgtgtatgtatgctgcatgcataggctgtaggggtgggcattcggtctaaccgaaaatttcggtctcgatcttcggtctttcgattttttcggtctttgaaaagggaaaatcgaatttcagcgcaaaaaatgttaagaccgacaaattcggtctcggtcctgaccgaaattcaacaacattttcatatatgcaaagaaataatagaaattttcaacataaaaatcacaaaaaaaaaatcgtaagcacttatgagtaaagactcttattagcttgcatgcctagaagaagtatggatgtgaaaaaatagagtttaatcctattaaacatagtatattgtaggttgcatttagacattttttttataattcggtcttttcggtctattcggttacccgaggaaattaaccgaattgaccgaacaaaattcgttttttcgttacgtatgactgaattgatgaccaaatttttcggtctcggtttttttgtttggttttttttgcccacccctaataggctgggagctaggctcgctggagcatgcatgcctcgatgtgccctggcccctcatgatcaccatccgtttcctctctctctctctcgcgcgcgcgcgatccatccaccgtcctgctctcgaaccgccgtctcgtcacgtcgctttcgcgcggcgcgctttccccacccacctcttgtctctctctcgcgcgcgcgcgagagcgcaccggtacaccaccaccaccaccaccacgtcgtccacccgatcggccgcatgtgcttccgtgggaggcggcagcagacgtgcgcgcggagagaggatgtgtacatcatcccgcggcccgtgaggccgtgacaaggacggccaatcgccagatcgaatgaagcaagggcgcgcgccggctaggcgcgcgtggaaggggaatatccacatgcacgccggccggtgtggcccccggcccgggcgcgacccctgccttgccggcaagataccgatccatccacgacaccgaatgcgcgcgcgcgagatggacgaatcaaaaaggggaattatggagtagcgctgcatgcacactagctgatctactgtagattcacctactacgtacagtatatattccaaatagagcaaagacatggttgagcccatcgcaaataatattgatgatcatgatgatgttgagaaagtacaactatacagagacgagctgccaaacaccaaccaaaaagcgcattccgttacaaactatcattaagtaacatgacttttttttcagctatcacattttcggcctctaaaatgcggcacaaagccaataagttctttaactgaataacagtacgtgatcaagggataaaccccaactaccctaacaaagaaaatcgatcgataaattaaacttaaagaaccatatagattctaagaaataagcctacaaatattgtggcatccataatgaaataaaaaatcctttatctaccgactcgaatagtgtagcaccattgcgtataatatcatgcttcccgatgtcataacattataaactaatattatgcttcccgatgtcataacattataaactgataacaatccggcaggcctaataacttaaggttgcttggaccccaacagttcttatgcacacccacccggggaagggctcaatctccctaaaagactagtccaataggggaagggtggctctcccttttaagatagcttcctcctcccaagttaagcaaggtggggggaaaaagactagtccaataggggaagggtggctctcccttttaaggtagcttctccctaaaagactagtccaataggggaagggtggctctcccttttaagatagcttcctcctcccccttttaagatagcttcctcctcccaagttaagcaaggtggggaaaaagactagtccaataggggaagggtggctctcccttttaaggtagcttccttctcccaagttaagtaaggtgggattattcagaggctcacacggtcgccgcccgacttttgcgtttttgccaacgggtaatagtgtaggatgaacttatcattcccacccccttaacaagggcccagctctgataccaaatgataaacaatccggcccaggtggggttggccgaggtccaacaaattaaggttgcccggaccccaacagttcttaggcccacccactcggggaaaggtccaatctccctaaaagacgagtccaataggggaagggtggctctcccttttaagatggcttcctcctcccaagctaagcaaggtgggattattctgaggctcacacggtcgccgctcgacttttgcgtttttgccagcgggtaatagtgaaggatgtcctcatcataaaccaatattggagccagctagaaaatatgaagataacttgtatactatatatagctatagttctatcaaaactagttggccgaatagatttccgtcaaattaaatagtgtaaaactaataagtccattggaagtaaaattgtaattgtaacagggtagctcgtgaatttgctcaatttgctaaatggacatctcattgcgcggtttggcatgatcatgctccgccttatgttaagcaagtgttagagcatgcaagattgtaatattattacataaccagtaattagctctcatttccctcaaaacaattattgtttatctctatatagaaatacacctacatttatatgcatatacaaaggtggtatcacttaaagaatatcatcctataataattgagacaacaagacctcttaaccattaatgtaaaaaacattttttattagctttgtttttttatcccatgcaacaaaaattcttttaataaatgctaggagtaagagttaactttgagccgttgtcaatgatatttctcttatctccgttctctatttttcacgtcactcgatttacttgcatggcaacgtgtacatgttcataataacgatcgatcaatctgcgaccatatcaattcatcgtgatttaattaatggctttaatctatcatattcttttattggtagaaatttccagaccatcacagaacaaaagtagtggaggcatgcacctatccttttttaaataagacaaatagattgattgatagactacatatcatttgctttatctatctgttctctttcattctcaagtagaggagttatgacggtgcaccagcacgccttgccgacacacacaaactgacgtagagaagcatgaagtggaataatgtaggcggtgttgcaagggcccagggttaacctggcatataccaattgccatttgtgagtaatagtgtggtgacaacattacaatgataagaacaatgcatgcatatgccttggggggggggatcgtcaattcggtgaattcttatgggctatggccctcatgggagactccacagataaacaaacactcttacaaatattgaattttacgtgtaaatcctttaaactaaataaacacaaacgaccccactaaaatataaagtaacaataatcgatcccacagtatataaatttttgctttgctactatttcagaatacgacaacgtcaaggagagcaagggtgaattcatcttattgtgaacatgatccgtcagaattcatcatagtgatcgagatgcaaatagctagtgtattggtaaggagtgtgtgtggtatcaacccaagattctatgtttacttttttaacacacatattatttcttctacttatttaataatcaagtcccttcttggtagtcctcctcgatctctctctctttcacagaattcatggaaagggtcgtatattttttcgcgcttttccgttgcttgaccaacgataaaaagttgctacgtggagccgtgaccaaccgtgagttctttcttaccctttcagaacacctctccgttcacaaatttatgtatttatagactataaagattaagaatgaaggggaaatgaacggaaagagtactactacttaaattgggagtgccttaggttgcattcatcaaattaattattaactagtaataggaatatattatattcatttggggggtgcatttggtttagaagaagttgcagtctgcagattgggtgtagacatcagcatagaccttgctacagtgtctttcagagtttcagttggctactctacctgagctgtcgaacagggtttctgacgttcatgtggagtatggttatgattcgcaatataatgtgctacagcattacagcaatacggcatgcatgccttaaaaaaagtatagtactacggcatcatgcattagacaaagacaagacctcgtgtttgagtgattcatatcgattggatggtttaaaaatctactacgaaatggatataaaattcttaaacctattggttgtggccagtccagcgtggaggctccctgcgcatatgcatgcatgctagtaaaatttgtctattgattgatctggacgttacagtaattttatccacagtttgaaccttacacagcttatttattctttatatattccgatggaacgagctcaaatgaactagtacttttcttgttcaacagagagagatcgaaagagagaaactaggatgaaccaggctgaaaaaaaaaacctaatccgcacttctttattttgggactaatggaccttacgtcatcgtgcgatgccagatgaaagagagaaagtcaatctttagtccctcgactatcactcgaatctaatccacataccttaattaacgataaaactgggtgtatcgtccccttcaactatcaaaactggcttattttacctttccgagtgattttgaaggtggttttatccggtgtgacggttacatggcattaggtcagtgtttttatctgatgattttgatctacttgcgctagcacacggtgcttatgctgcataaaaaataaaatcactactgccaccttatccctccctctcctcatctctctctctctcccgctgtcacattgggaacagtgtggcccaacgcgcgacgcgacagacaatagcacaacgacagtggcaacgccgagcaaatccaagtgattaggaaagtgcttgggaaaacaatggcggagaggtggtaggaagaaggacatgggatgggaaaaagccaaggtcagaggcgaacctagcctttttgtcgtgagaagcccgatagcagtgagagtatgaaacttggaggccgcgatgatgacaagggcctcggagagctatgcttggatgaggggcgatgcggtaaggaggagctatacgtagtcaaagagtgggaactgggaagtggtggttagcgtcgtcactgtagagggagggcttgggccaatgacgccggaggaaattcttaatatggacaagttgtggcatgaggaggggcaatggcgagcagttctagcaagaagccttagaagcacacggtgaatactaggctctgatcagtggcgagatgtacggtggcgttgggggagagctacttagcgaaccattccaccaaagtatcgagcatctttagcgccacctccattcctaccaccaaggttgatagaaggcaactgcattttgattgaaccaaggagatggggagaggagttagagtgccattaagagagagagagagagaggaatggtgaagaggatgagaggtagtcacttacatgtgtcccccatttcaaccttttcatttcttgaagagagaatagctaatgtttcgctggatctggcagaccagctgtcggcaggcgttgcttcacatttgtggtcagtgtaactcacggactcacgagaacggatagttcgtcacttgcaaaagaaataactcaagcctattaggtttttcttctaatcttctttcgactagtataaaaaagggatgggaaaacaacacagcacggttgtaattaacaaaaagtcatacagtaccatacaggcagctgctgctccgtaaccggttgcccctggggcctggcacatgagtacttctgtagttctgttcgctgatgccggccgggcggctgctactgtagtgcgctgtgctcgaccgcatccgcgcatgtccgtcgaccgtcgttcgccttcttcgcggtgcactcagaattaaccaagcaaaattcctccgccgcaataccgaacccgcgagccagtcggctgccgaaccgaccgtctcttgcgccggtgaaatcctatcccaagtcccacacgctgacacgcgcgcctcatcagcgagatggttcggtctcgttggtttgggagatgcaacggttggcggacgaggaattcgggacgttgggcttaaggctacaatgggcaacaaaaattaggaataatttcaccggaggtccctcaacttaacaatgagatttttttaacatccctttaaccataaaagcagaaatgtctacccctaaactcactcaaaccgttcaaagaaggtcccatgataacacatatgggtagtttcgctgatgtggcatcctagtcagaaaaaaataaaaaaataaatatgtggggcccacatgtaagtgagaaaaaaaatgtgggtttaaccattctaatcagcaatctcctactcttttcctttttctctttagttttatctttgcagcagaggggggggggggggggaggcggcggtgcacggcccgaggcaggcggagtggccgtgtcggcggcgggcgagcggcgcctccgggctcaagaggtgcagaagggcttgggacacggggtcgcaggggggcgagcggcggctccaggctcgggaggagcatcatcggcggtaagcagcgggcaagcagcggctctgggcgcgggaggagcagaggggcgggaaacacggcgggcaggcggtggctacgggcgcgggaggagcaatggggcgggggacgaggcgggcgagcgacagggggcggagcggagcagcggcggtgacaaggggtgtgtggggtggttttttttggcgtcatcggcgcagcagagcacccgcgcctccgccgcatcggccgtcggccgccacgcgctcgcccgcctgctccagccgctctccgctgccgccaccccgctccactccgcctccgtcgccgctctgctccgcttcgccagatgcgttccgctttgccggccgcgcgctcaccgcctcgctgcttcggacgcgcgcttgcccgacgccgttgccacccgctccactccggtggtcgccgcgcgctcgcccacctgctccggccgctctcggtttccgctacccgctccacaccgccgccgctgtcgccgctccgccaaccgcgctctctcgccgctgccgttccactttgccggccatgctctcgccgccgcgctgctccggacgcacactcccccgccatcgccgccacccggctccactctagcggtcgccgcgcgctcgcccgcctgttccagccgctcatggccgcccgctgtcgctccccctctatggcaaagataagaacgaaaagaggagagaggaaagaaaagagaaaagaggagaagatttagaaaaagaagatatgcgggtcccatatttttttttccttttcacttacatgtgggctccataacttttttattttttattttgttgactagaatgccacgtcagcgaaaccaaccatatatactgccatgggacaaactttgaatggtttgagtaagtttaggggtatacctttctggttttgtagttaaaggactaaaaaaatctcgtggttaagttgggggacctctggtgaacttattcccaaaaattaagcccagtcaatagtccaaagttccagtcagttaggttgggccgtctgcgcaattgctagcagaaactgagtaaactgggccgtgtaatctgtatgtccattcaaaatcaggcccactatatgttctataccgcagcaagacaatggtaagcgagtagcgacaggaaacgaccactcacgaaccaaaatctcctccactactggacattatccagccgaacattatccctggctactggctagattcttcattcttgatttgtgaataacacatcatcatcctgaacctgcagcatccgtgtctcggtgatagaatggctgcctggatggatggctagctcttcccccaacatgtcacacagccgatcagttcctgcatcgatcccgaatatgatgccaaaagcaaaaaccgtccttcagcattagcatcccccctgcaacatgctcgtgagcacggcatgtgttttgatgtcaacttaccacggcatccgtccgctagcgctagtatttatacgcctagttagtctccgcgatcttctccgatatatcgtgcacatccatatccacgcgcacacgcagccggctggaaggaagaaaaaatgctgcggttctggaggacgcagaggagcgtcacgtcgtcagacgccttgtctgtgagtaaaacatgtaaatgcaccgtcagaaggagatggagtactatacattttccatatgcatttctgagtgctgtttgtgtatgtgtgcctaagatcgtggagatgaacgtccacatggactgcgagggctgcgagaagcgcgtgaggaaggccatgtcccggctcgaaggtgccagtactgtttcgtgtgtgtaaagtatactccagtacgtgtgtgtttcgtgtgtaaaatgcgtgcgtgcgtgcaggcgtgagcacggtggagatcgacatggacacgcagaaggtgacggtgacggggtacgtggaccggcgggaggtgctccgggcggcgcggcggacggggagggcggcggagttctggccgtggccgtacgacggcgagtactacccgttcgcgatccagtacctggaggacgacacctacatggcgacgcacaagtactacgtccacggctacaacgccccggtgatcggctcctaccccaaccacgccttcacccacatcgtcgacgaccacgccctcgccttcttccacgacgacaacgtccacgcctgctccatcatgtgacctaaaatataatcttatttaaaatcctacatgccagcgacagatacatatctgaccaaatcgaacaagctaagtgacctaattagtggtgcaaaataagagatgaaaaaccaaatctaacttcgtcgatcatctagtaatggtcaagtagttgctcagcaatccaacgtgcaaagagtgtggtgatatgatagacaaattaacgaataggaattaaggtcgaactaagcttatcaatcgacaagttgttcttaattaattgcactatgcgaccctttttcttatgaacatgaattaaaaggaagggagcagtagaactggattgctaattaacccgctatccttttgaattgactattcgacgggcatctgcatggtatcgatgcttgctgttgacagcacaaggggaagaaaagggtggccctgaaaattttcaactgttgatgctagctagcggctgatctcgctgaggtatctgtgccagtaatttttgtctgcggataggacaacatggagaggatgactaggaaaaggagcactgttcaaactatccaaatgtctccaaccaaaagtgatgacccatccttgcatatgtgcgcatcagtgcatatgttcttatgctggtgtggggtgaagattctggtgtgaggggcaaacggtgacaacggaaaagaaggttcgaatataccctgttccctgattacaaatacagttatgagttctgaccattggattgtatacatatgacaaaaagagagtaaacttcagttcacacatcagaccaaattgagtacaggtgctaccagtatttggctttcgaagatattttacattgggacagcgagaggagtaagttcagttcacacatcagaccaagtttgatgcagctgctcaatgctctgtttgttcgttttgtcagggaatatgggctaacagtgacccaatctggattggattcctatcaataaataaacaaataaatctggattggattgtggaaatgataagaacacgcgtgcaatttgatccactttttatgcgatcaatttgggaggaaatgctctttcgtttcgctctcacaaacctgtgaacaatttccaccctctgaactttcagcattgttcttgtattccccacttcctgaagttcttaattctgtcaccaaacgacttggcatgcagaacaattcagtccctcacgagatacagaacaagaagatatattatcttataccccatgggccaggtaggtacaccagcaacaatgcaaatgccgtcgcatcgcatctcagatacttatgcccactaagcttgaccattatgttaacttggattaggggtaggctagagattgattggggcttatatgataacactacatatacacataaaccacaaaatcaagctatcaacattcctcatctcgttgatgccgacttatatctgccctgatagcgcctaattaacccgtgaacaacgtgtcttttcatcgtccaagtgcccaaccaacacatgacaaaagcaaaacgagtaaataaatttatttagctgccaataaacaaaggaaactggacctgcccgtgtcgaatcaaatgctaataactcgaatctggaacaaaattaacgccaaaaacaacacaaaaaacgactctttttttttctccaaactcgactcggctttgagagttctaatcttagccaggctccaccccaacctgtgctgccctgttcgagcgaagaacgaaagcgacacgagccgtccatataaatccacgccgtcgccgccgaatctcgcgaaaaagctcgcaaatttctactcggggaagaagaagagccctctccaaaggatctcctcgcccggccggcggcgatggcggccgcggcgccgatgccggttgccggagcggggtggtgggatctcgtgaacggctcgacggcgtggcaggacgggatcttcctctccctcgccgctctctacggcctcgtcgccgcatcctccttcgtaagcatctcgccgcagtgctcatctcctcctcctcctcctcctgagtcctcctgactgatactatactctagttatgcttatgcgaaagcactgggggaaagattctttcagaattttgtgtcaagatggattaaggggtaaaaggaataacaatacacgtactccaactgggttggtgacttgagttcatggcaggagaataaagacttgatttttggtgcttgtttgatgggaataccgcagatttgcgatatcaccatcagcgagtttaattgggaataaagacggttttgtattagctttgtgctttgagcataccagtgttttgcatctgaaacttgtaaaagctgataatgaggacgaatattttacagaactttagatcaatcaatatgaaaaacctgcgatttgaaatagagatagctggacaaggacttgtgattatctgccatgcttatctttctgatatccggaaatcctgctggatgcctggatagacagtacaaaggacaataatgtgtatttatgccttggtatctgaataatgagtagttactacattagtgtgggaagtatgaactgcagatccagttcctatgcttacagatatggtgcacatgtgaatgctcgctgttaaatgattaaatttacttgaggaagacaaggcatacttaattacttatcatgtgatatgcagatccaagttgttaggatacagtacagagttcctgaatatggatggacaacacaaaaggtctttcaattacttaatttcattgtgaatggaggtatttgttcaatttcacttgtagtacaagttacatgctcaactccctttgtgcttttgagtttaatgtgatttcaatctgcagcgaggtgttctatctttgcagtccgccgccaagtccaacaagtgaaccctgaggtctggacatctttgctattttctgtcttgtaattgttatgtttcacccaattggccagagttatattcttcattcatttttattccagatctttcagcatgttattcttgatcttccggggcttgcattcttcacaacgtatgcaatgttggcacttttctgggctgagatatcttatcaagcacgtggtctagagactgaagggcttagatcaggtttctacactattaatggtgtaatatatgtgatacaggtaaagcaagttatctctaaaagtctgtattgattagtgattgctatttatcagattttgtataattccgttagcattgcaataatcaatagtacaccctattgcacaagttgcggtgatcagatattttctttggaactgtgaatttcaagaaatttgttatagaccatgaaaagctgtgatgcgcttatccatttttccctgaaaagaaaagatatactgttgctagtatgcactgatgtgaaacaatgagatactggatgaaagtagaagggaataactttagctgttattgtgccacttatcttgtgatggttcagtgcttgcttagtataaaacttccgctaggctgcgtatctcaaaatactcactcaagtttatttcttcaggttctgctgtgggcgttgttgtggcacaatccaaacccatctatgatagtcctttcgaagttgttcattgcaggcctatccttttctgcagccttgggttttctgctatatggagggaggtaggactaagagtattactgaatgactcttaaccaagtttcatcaatcatagacagccaaattggctggctagactagctgcaaactatgtaaccttgaaccatttagtctactaataacttatacgtagaacagtatttcaagaaaatgtccacttattcagtgcttcatctagcatttgacattaacattcatttgccctgttttgattggcaggcttttcttcatgctgaagcgttttcctattgagtcaaaagggaggcagaaaaaactgagggaagttgggagagttgccactatatgcttcctttgtttcttggcacgatgcattatggtaaggttttcagttctctgatccttggatgagtttttgagtttcagtgttccatttcttacttgagcggttttgacactgcccaatttgttttgcagatgtgctttgatgcatttgacaaaaaagctgaccttgatgtgcttgaccatccaattcttaatttcatctattacctggtacgcatgaatcctgcgaccatattgtttacctcagtgaaatcaactttttttccccgttatcagttctagctagaaattgatttccattatcaataccagctaaatatattctgtacttgttcttatcccctgtttggctgtacttgcagatcgttgaaattcttccttcatctcttgtcctgtttattctgaggagaatcccttcgaagctacggctcgcccagtatcatcccctcaacagtggctaggggatgaaaacggatgaaaacatgaaagctaaaaatatggagaggcctgcaaagtgacacggctgcaagcccaggacatgaaaaaaaaggatgacccatggtctaaaatctctaacccttgttcaaaatgtgtatagatagggatctgaaatctgaagttttcccacaaccttcacctcctgtagctaaccttggtggttcaaggtgctgatgatttcgtgtaaccaattgttcctttgtaacaatggaagcaagtgtcctcgctcttttgagcgagcaagccaatgtttgtcttgaaaaattcttgggtaatccattggtaattgcttactactgataatatccgctttgctaattgctagcacaactcgaatgtgctggatcaaatggtaatccagacatccagtatcaacgaaatttttgaagttttgcagagtagcagcgtgatgcagaggtttctaccaactccgcttcgtcagaagcgaacgccgccacctaccaaacgcatgaatcatacgaaatttcaaaattgaagtcttgaccctaccaaactccgccattcttctgttctggtctgcaaatatttttttctctttttttttttcgataactactcgaggcttggaaatctccgagccgcgagcaaaccctagccgccgccatggccttcctcgccgctgcctcgacccgcgcgccgttcgccgtcgcggcgtcctcctcccggcgccgcaccgtcctcgccgcggccgtcaaggccaccggcggctccaacccggccgccccgcaccccgtcctctcctccctccgcctcgccgcctccgccgccgtcatcctcgccgccacctccccggcggccatcgcgtgcaccccggcaccgccccctcctcccccggaggtaaccgtcgcggcctcgcccgacgatcccgtcaccgacgacccccaccccttcgagaagctaatcgtcgagaccgccgcgctcgccagcttcggcggcgcggaggccgcgcgggcccgcctctccgccgccgccgccgccgccgccggagtcgtcggcggccgcgagcaatacgcccgcctcctcgccgcgcaggagctcttcgtggacggcaaggtggacgacgcgatcgccgccttcgaggagctcgcccgggaggaccccggcgactaccgccccgtgttctgccaatgcgtgctctactccgttctgggcagggccgccgagtcggaatcgatgctccggcgctgccgcgagctcgccggcgaagaatccgtcgccgatttcgtaatgccggtctcgccgttgccggtcgattcgtcggaggcggaagcggagccggattcgccggaggcagagacggagaagctgtgaccggaatggccggtgtcacggttggaataaaggtattcacttgactcgcgatacaaatgtagggagatattaaatggcgatgatttgataatttttcatgcaattttagatttcaaatactacatgattttacatgtcctccaaataaaatgaagcgatcatgagaatttgatcgtattgataaaacagtttccacgatgatcgcattgcttagaattgagtcatttgcaggaatatcttatttattcctcaatcctgatggtggttaatccaccgtcgcagtgaaatttgttggaatcgaccgatcaactaagctcatcttcactctttgctcgtctctggactctggtagctgatctaagaacgtatacaatcaacatgtatcgcagcgacaaatgatcatcgtttcagcactagcaggttaggcagagcagccacaaatttcaagacaacgttgttttacgctgtaggactccatgctaatgccagtgctcaatgctgatacccggtcacattatttgtccccattctgagcgaacacggtgaaatcatgtattgctgctgtctgtgttgatgttgagggaagttatctgtggatcacgtaatgcggctgctagtaacagaaatatctcctagatagcattgttggcctgctggggtaatgacttccaactgatgaatgtacaaatggcatgtaaaatgacggcaaactagccctcgtgctctctaccaggaaaagagagttgtctcttcctacttcccatgggattgtcttgtgctgcatagctatccaggcggtctcaactcttctgcttgctataggaccagatgagttctttctttttgccaaccaaattcaggacgagttgggctgttggagtttggccggagcaaaacacgttacgagattgttgccatgaggtgcaaggtggtctaacgtgcaagcatgtttgcagtcagcaacgtacaatttttcatttttttttcttcagcttttgatgtgtgcttaatctccttctattaatataacgccaagcaacctgtttggccctttgaaaaaaaaaaaaacacactgacgagacaacgactcaataaccatccctggtagttagaaactcgacttgctttgctggtaaaaggagcattcaacataaaaaagacaaccatttattatgccattcaaatacttcttatcttgattttgaaacatcagttgcatcaccaaacataaataaaaacacaatatttggttttcccgggcttcaccgtggtcaaagaaataacttggcccatgttagcaatcccgagcaacgttttggccgatcgagcaagttgccatggcaacgaagccatgcatgcaacacaagatgcagagaaagaaaaccagacgaaaataaagttgctaatgcatctgcataagcatgacacacttgaggacttgaacaattgacccacgacctcgatcaatcaatactggcggtggcggatcagcgacatccgggagcctcgcagcttctcctccacgacgtcgtcgagcctccgcgccatctccggcgacatgtgctccttccagtctccgacctcacccttcctgaagaaggccgagttcttgaacgacgaccaggtagccccgtgctcgccgtctcgatttgcctccacgtttctcatcctttccatactgcagagctccacgatagtttcggggacgccaccggcaagctcctcgccggtgaacgggcagccgaggaagccggcgagccgcctcacgctccccacgccgtcctccttgaggctctcgtaccggaggaacacgacctcctccggccgcgccaggctctccttccagtactcggcggcgtggtcccacataggcccgtacggcgagacgccgtcgcagagcagctcgaaggcctcgtcgaacggcgtcatggtggatccctctggtttgatctcgtcgaggtaatgccggagcgagacgaacgcgtccttggggtcgcggcacaggtagacgacgcggcacccggacgccttgaccgacgcgggcaggctcgagagcggttcgtgcactgccaggatgcgcggcgacggcatggcatcgaggcgatggcctggcgcgacgcggcagctgcggctgatctcgtagatggagtgcaggaatggcacgaggtcgtgcgggctggagtggaggagcgggtgctgcccggcggccggcgcgtggcggccgcggtgcacgacgcagaaggcgagcgccttgagccacgtcgagccggacttgggcatggtggcgaggatgacgtcgctggggcgggccacgaacgtgtcccgcgcggccagcgtcgccggcatcaggtgcgccgggtaccagaatccgccgtacctgcggtacggggcgctcccgagaccatggcaagacggtagggaggacgcgagcgcctcgtacttggcgagggcgttgcaccagccttccccgtcgccggcgctcatgtcgtcgcctgcgcctgcgcgcggcgagagcaggtgctcggtcactccggcggtggccatggcattcctgggtcttggaggaccaacgcctctatctatagatggccatgcatgccaatctgtatttactactccctccatcctaaaatatttgacgccgttgaccttttttaaaaatatttgaccgttcgtcttattaaaaaaatttaagtaattattaattcttttcctatcatttgatttattgttaaatatacttttatatatacatatagttttacatatttcacaaaagtttttgaataagacgaacggtcaaatatgtttaaaaaagtcaatggtgtcaaacatttagggaagtaggaagtacaaaatagtactccatccattccaaattgatctacatatttcataggtacatcaagactaagaaaaactaataattctctcatactatatttactctagcaacaaacttaatacatgcatcatccccactatttcctagccaatagcaaatcaatatattgcatgtgggttataaatacatgtgtgcatggatgcatgcatcaatgtctatttactccaatgcagaaataacgaatagacctaataaatgaacacaaatatgcagatcaatttgaaacggatggagtaattaactgggggtgcagaacttgtgcgtgttaaaaaattattgcaagatacacatcaaaaggtacgattatcaatctttttgcactaatgcgccatcgcctatttgactcttccagtctaccgacacttgttaataactagtgccaaatctctacttgcctctccaaatctgcatacaaaataaaacaggtgccaagcctaatatactactctttgtacgactgattgaatcatttccaatgccacggccacgccagcatgaggtttttttttagccatagtgtagtattttactagactagaaccaatctgatgagggtacaagatgtttgctgatcgacttgcacaaaagttggtgcctcttgtccgcctaaaccaagttgcaaattctgaccatacttttcaaattatttctatccagctagcagagtttctacttcgaaattctaacgcatggagagagtaagatacttcgcaaatcatggatagaatcatagagagccatgcctttcatcatatcaatatctcatcagaacttcagtacatatggttgagaactatattggatacatgcatatagctactagtatatatatgctttagttgaaagattccacatccgggagcagttcgatgacacaccggcgagtagaggatggattctaatctctcgggtggacgtccacccgtttcttacatgtcacctaaatgattatgaaaaaaatcaaaaaaaaattacaaggtaggttaatatataatatatcacttcacaaacatgtaagttcaaatttgacttttacgagtctatttcgccttcagtagtctatttcgccttggatttctggaaagagtaacggcggttagttactgtaaggaacggttactgctcaagcctcaaggccttagccaaacacagaattcagaaaggcgttaagctagctttctttcgcattaactaattaatttcactgcccaaatatgctgcatgatatgaaagagcacggaagaggacacgatcaaatggtaaagaaaataaatgtttaaaatgtcaggtttaaacgtaccccaaatcgcgagccgctaagacgcagggagtccatctcgagcaggtcgtcgacttcgtccagctcgatgacggccctaattatcgcattgttgagttctttatcctcgctcgcgttaaagaggcagcctctgttctttgcatcagccactatctcacgccaaatggtctttgctactcgctagagtatttgcattgccaagaatccaaagacagtgcctgcaaaaacaaaaacaacaatggatcaaacaacaaaatcggagtgaaatcaactctctgtgcgactgacgtaattggccgggaggatcgaggcaacctacttggcccgggtcagcgcgacgttggtgcggttgacgttggagaggaacccgaccgatccggtggtgttgctgcgcacggcggagaagatgatgatgtcctcctcggcgccctggaacccgtccacggatcgcaccttcacggtgaagcccccgtgcgtctcgtacgccttcccgagcctctcctggatggcgcggacctgccccttgtacggcgacaccacgcccacgcacagcttcctcccggtgtcaaccgactctgcacaaaccaagctatctgagctcagcgatgccatgccagaatgcaagggcatgatgcaatgtgtacctttgaacaatctctgaacgatccgggtcacggcggcgacctcgatggggttcatgaggctcttgtcgtgcttgcccttgctctccttgccggcatcgacgttgatgaaggagtaggagccgtacattggcccggcaaggggcttcctctcgtagtccctgtgtaatacgttctcgccgtcagatatcttgttctcgtagaagcttgagaccgggaacttgctgatccctgggtgcatcctgtactgcacatccaggaggtgcttcgggtgtcccagcgaactcagcctctcaaacaggctccttccaaactcagcatcttcacaaacctgtgaagaaacaaacagacaattgttacatagcatagtaatagagattgtgaatgttctactaatagagatggtgagagcttaccctgcttttgacaagtgccggcagctgaaattcatagccgatgagaacggcgtgacgaacgccagggagctggagaggtatcagtgactcgcactccttcagctgtgctgcctcgtcgacgacaaggagatcaaacgggcttgcttctggcaggtagtgcagacgggatgagctagaagctgtgcagagtatgcttttggcgttccggactaggaaatcttctatcgaacgcttgtcgaaaacgttcggaagttcaaagtgatcagataggtgttttagcttctgaagacactgagctctagcatccttcagctctgtactcacactatcttgcacatatgtcacgaagttctgaaacagtgagctgatgctgccatcggggctgagtttgaacagggttttcaggctctgttctgatttgggctccacaagtttaccaaaaaattttagcatgtgcagggcctgggtcatgtaactgaaattctctgcagttgtagctgacctggggagataatcacagaaagtcttgacacaaacattaagatcattctcaagccgtttgtaattacttatgaagtattccttgaactaggaagatagcccgcgcattcgcgcgggcatgtattgtgggctgcatgtttcaaaaacttataagaacataatattaaccgaatagcactgtcacacttcgaagtatgttttctccacaaatattattcgttggtatttgttattttccacaaacgtgttatctaacaacttaaaagtgtttcacattgttgtaatgtaagcaacatgttgttaatcatatggtttaaaaatctttgtggcttttcctaaatatttatggctgaccaatagctagtctccaaaatatgctctaaagtaatttatttcttttacttgttaaatatagttaatttggatttcgactcatgaaagtttactgcaaataatctaatgaggtgcactaataaaaaaatagtttagatggtatagttgtttaaaaatttctatcacgaaatatgttttctatctaactaataagcatgaaaatagggcaatgggagagaaggaaaagaggaggcgaggttgtgctcgtgcatgaggggggagggcgcagacatgcacatgtacggacataacataataggacagctagacaggagggatgggattgggccttttctctttttgtctatctattaagataaatctaatggtaaaaaaataatgagaccatggtaaaaggcatatttcatataaattatgagtatatgtgattttttttaattatttcatattttattaagtcaatttagatgacatgtaaaaaaagtagggatgttgtctcttgacaaaacactatttaatagtcgagtttctaatttttgtttgacattgtagttttaatttacatatgaatgtttctagaataatgtggatgagaggaatggggaggaaggggaaaagatgtttttttatttaaaagtttaatagagatagatttaatgttaaaaataataggtttatcgatttaaatagaaatcattgattaaatgtttcttccgcagtatttgtagtactttttataatttattagatgtgccatgtgatgagctagaaacactataaaggatgtataatggaccattattatataatggatagatctgtatgatattttatggggatctgcttaatgaatctttataatataataagcattatatagtaattatttatatactaagctgctagctagaaaatatggataataaagtgagtaaggagagagggtagatcatttacaatggcatgatatgtattagtatttagttatcatataaaggatatgagtttatatccaaatggtctatttcttatatgtatatacacaccaacacatggcataattgaaatcaaatatattataagaaattataattatttaatattaatattttaatataaaaaatttgctacctataaataaatggagaaaaaagagagaaggtgggggacgtacgtacgtggtttttttttacaagcgtacgtacatagtttggtgtatgtacgtgatggagcggatacgaatgggttttgagattttttttccttgatataagatggatctaatggtgtgaaacgatgggtccaccatgttaagttgtagcgcccgtttcgtcgtggcgcctagtgggaaaactatctcttaaaaatcctaaatgcgaaaattttctccttgtttgttgtccagtgtccgtgccattccagatctcaattccccaatccattgtcgaaatccaaaccctaatctcaaatccgtcccaaatcaaatcctctcgaaaagtctattttgcctccctcgagttcgtgggccaatctcttctccccggcccatttcctcctcagcccaactctcctctcccctccatccttgcccgcacatgtgaggcacgtgcgccgctcgggcgctgagcgagagagagactctctctctctctttcacttctccctccctctctgctctcgttgccacttcccgccgatgccgctcaaatcgccgcgccacccgttgcttcccgcgcgcgcgcgccaaggtggccgaccggcaagtcgccgccgccatcagcgcctgctgcgcctgagcccgcgtctgccgccctgtagccgcgcccttccaaaccgccccaccgtcatcgccgtcgtcatcgacccggccccgctactccgcgcgctagcttccaagggatggaggcagagctcctcctcctgcctcgtcgccctctctccctccttcttttcccaaagaagcaaggggcaagccccctttcttccttcctttttcccttttctcttccaccaccggcgtcatcctccctgtcgctgttttggccgctagccgggacgccagctcgctggcttgaccgcccaaggtcggttttcgaaccgacataaccgcccaataaacccgagcccctcccctaaacccatctccctcgctttcgccttccgccattgtcgcctcgccccgtgccctgttcgtcgtcgcccttcgctgtcgcgtgcgccggaggagccggtgcgcgctaggatcggaaggggactccgggcactcgtcttcttcctcttccccggcccgaggccggagagatcactcccgtgccgtcggcctctcgtcacagcgccccgtctcgtctcggtagaacacctccctgttctccctcctcgctcttcctcctccccttagactcgagcagtagcttgtgtagcctccccgtagctagcctgcgtcgccccgaccgctgccgccgctcgcagtaggctcaccgccgtcaccgccgtgctcggtagtagccgcctgtcgccggccttcctcggcgatgttccgtccaatccgacgctagaaacggattcccggagtcgcgtagatgctctagctcgcccgaatcgatctcccgtcacgccatcgctgatttccccctttctcgccgccggttgctgccgccgcaatccgccgccgtcgagccccctccggcgaatccgagccgttggctcgctccctctcttttccccttgtcattctagtgtacacctcgtcgccctcgtcgtcgcacagcgtcccggagaaaccgtcgcctcccgccgtccattcgcggccggcgccttcgtctttctcccgccggcccgcgtggcagccacgaaggcgccacatcggcgctagctcggccggaacgggtcaagccgaccccggtcagccgctccctccgtccccgctcgcgtgcgcgcggcccacggagagctgagaggctgcgcgtgggccacttgcgcgccgcgtccaccgcaagccacacgcgtgcaccgcacccaccccaaccctagcgccgcgccacatgcacctcactcacggtgagccgagccgccgacaagcgagtcccactcgggaccacgcgaggtggacccggcccaccggttcccctccctctctccccgtgcgtgcctttgggccgccttctcgagcccgccggcccattagctcggccgagccgcgccccttctctcgggccgcaccctagccgcccgagggaagtctgttcctcctccctctttcttttctttttcaaagggtttaattaaatccgtattcctttagaccaaaaatccaataatcttagaaattcaatatcttctcaaccgtacatccgtttgactccgctcaacttccaaaaatcctcaaatctcgagatctacccaatggcacgcttagaggtcaataatagggctttaatttcgctgtttgttgagtcgtctcgttcgcgtgtagcttccgagctcgaagacccagagtgcgcggatttcgaggatcaagcttaagatctcgagcaaggcaagtcacctttgatcatcttgcacctataatttaaatctaagtatttcttttccgcaaataatacatggataggattaacacaagaaatttggccgcggcttgcgagatagcctaccggcccccatcctaattgctgcaattagcctccttgaattattgaacacttaaacctcctttgtcgactgttgtacttcgatgtacgggccttcgggcacgcacgtcggagtcctcccctcaaatttaaaatatccaacgatgggtaaaacttgggttttacaaaagacttggaaaaacccgacgcctgggtcgatgcttgcgaactaaatgaatttccaaaaatcgcagaccgggggacgtgccgggagcacggtttcctgctcttgcacttaaggaccgattcctttggaatttcatctgaacatataacaagtacgaccacatgggtggaatgggacacccctggctgagtaattagctaatcaggggagccttgatgccgggagacaagtggattcgccagggtggtgtcggggaggacccctgggcttcctggcatagtatggtctaggacctaacctgttgttggtctgggacccctctcgtcggcatatggtaaacctgtgtcggctctcgaaatgccttgtcatgaaagccttaaggtcaccagacgtggctgttctccatgggctgggtgatccgggttagtaatgtcgtgtgggtaaagtgtgccccctctgcagaggttattaaactgttcgaacagccgtgcccacggtcatgggccgatgtaaggtgattccttagtgtagttttgttcgactagtgcttggtgaaattgctgttgggaatttgggttcgatgtttggaacatctgtagctgacgggatcagctaggcccgggtggccatttgaaagttgtggccgggtgccaatcttgaatcaatcaaagactgatacattgcacatactctgaccggacgagatgtactgtctcatccgtgtcgtttgagaagcactcacttagttgttttaaaaatgagtttaactaaaaatcaattgtaaaaacaacagcctttcctttgaagccttcattaaacacataattcccatgacttgctaagtactcctgtattcacccttgctctatataaataatccccccagtggctgaagaagatgagatggaccccgctgacgaggagttcttcaggagcaagtcggctatgatgagttttggggtttcgatctggttcccaagtcgcgcctgtgatgttaggttcaagtcttggcttctgctttcctcttttgtaatgcagttgtgagctcggggtctgtccgcagcccaacatgactgtactcctactctataataaagagacctctgttgctgtgatattctgtcttcctgtgataccagctctatttcctgggattggtatcggttaacaggttaatttggagcgtcacaggctggttccgttcggggctagttcggggcgtgacataagtgaaaactgatggttggatttttattttttcctcataatttctataatttgttagagtgccacatgacgatataggagtgttcgtaggagccacatggcggtttaggagcgtttgtaggaagtttaatggacttttagtatataatagatagatggcattattggtatgaccttaggaacatcctcctttacctgctttttatcattctccttgttcttgtttttgttccttttcttctcagcaagatcctcttctatctccctttcaatttgctccacatatgaatcatactgaaccagaggttgctcaagaatccgtatcatggagctcagactgtgcacccaccctgaacctggactcaggcacttctgcagtcggcgagcgcgcttctccaagaagatctttgtcaggtttccgtccacgttcatccgatcctcatttccgaacagcacaacatcactcaaaaaacaggcttttccactgccagcagaaggatcctcgaggagattgaggacccgagatgcgacctcgacgacggcggtgttcgtcggagcgcaggtcagtgtcctgtggttcttgaccagcattgcccacaggagcgtgctgatggtcttcgtcttccctgtcccgggaggaccccagatcaggcgcacggaagagctccgctgctgcatcgctgacacacagtctagtactgccaccttttgcgacttgttgagcttgaaatcttcaaggccaccaagtgctctgtccggtagatgtaaaggcagttctgaagaatatgaacattcttggccgacctgccgtaagaattaaagaacatgcataagcaccaaattgcatgcaatggagcagatatattacatggtaatgcatacctttggattgcaatttactatcatccgaatgatgtcagtgttcctgacactagcaaccaccgcatccagttcactccatatgcgattgtacgtcgtcatgttgatcaggaacaccgcgaagagagacgattccaatccaaactgctgctcaacatgcttacttgacagcctgacgacggtgttgccttcagcatcctcggctttgagcaccgaggcaatcaccaagggcttctcaccgcgtcccaggtcagagatgtgcctcggtttccgatccgtcagcaacagtgtatccgcctcctttggggcgtaaacttcctgaaaaatgtccttgggatcagctttattggcgaaaaaactgtatatgagctgctcgtctgagcaaagcttaatcctggtcacttcagctgctggcgcatgcttgatgccttccagtgcagagcagagatcagcacgagtctcttcgatcagcggcacggtgaatgatcccatgtactctttcagcgaggagaaaattgtgggtattttcttaacctgcatcaaggcaagatcatccgcgagataatactcagattacagcgagagaacaagctggataatgcgatgtacgctaccattacagtggaagagattgtgtgcaaactgcagttcatgggataaatagttattccctccatttcatattacaggtcatgcaatctttttaagttgagtaaattttacaaaactacacgttttgtagtccaagttgcagaaaaccacaaacattttgacacttggcacttaagtacatatattttgatagtgtagtttcacaaaaccacactatcaatgaatagattcacccgtgagatgacgtgactgtttcatataggacgaggacatgtcatcctattaacagccatcgcacgaaattaataggatgccacgtcttcatcctaaatggaacgaccatttcatctcacgggtgaatccattcatcgatagtgtggttttgtgaaactaaactaccaaaatatatgtacttaaatgccaagtgtcaaaatgtttgtggttttctgcaacttgaaccataaaacatgtagttttgtgaaatttattcttttaagtttgatcaaacttatactacctccaacacaaaacatatatactaataaaatatatttaatgttgtatttaatgaaactaatttgatgtaaaagatgttaaatttttatataaatttgatcaaacctaaaaaggtttacttataataagaaacggaggaagtaacaatctactgcttggttacctttttcttgagtaagtctttgttgagcacatctttgagggaccaagagaacatctgcttctccaactcgctctgcgaccacgaactgtacctgccatcttttgcccttgcggatctcgtccccgccccctgctgcaccagcacgacgtcgtcgtcgtcgctgtcgtagtagtagctcatcgctaccagcacgacgtcgtcgtccgtccggcgagcgaaaacgtttctggctccggttggaagctttgcaagtgtaggtgatgatctgattctactttctaggctgcagcaatgcgtcgaggatttgtagaggcacaagaccggtgggattccgtctgcgaattaatgtttgagttggggtgtgtagggtcgatccacccttccgtctctcagtgtgagtgtgtgacccatcgttctgagaagagaagcgcatgcggttgcattcgctagtgaaaaggtgagagggtgtttggtttactaggagcccaacaagtgaaatgcaatttactgattgttcaactgatcgtctgagggttgtttttctttatctattataaaagtttaagatgtttttactagaattttggtacgtcatctgtgtttaaaacggttttagttttatgtttcggtttaatctatatctctacgacaagaaatttccgacttctgtaaaaaagaaagaaaaagaagtccgactcaaaaaaaggtaaataaagaaagaaaagaaagtccaacttaacgagcgattttaaaaagaagcttacatcgtcacttaactagcgattaaaaaaaaagcttccgtcgtcgtcagtaaaaaaaaacatctcttgactatgtagaaaaaggaaaaaaaatctcccagtaaaaaacaaaaatgttcgtttggtttttttggcaccgatatttttttccttttttctttgcacgcaaaagagttttttatatgcacacattaaggtttttggtttttttttcctttttttaatccgatctattcaccgcgcgcctctcgggtactcttagtttttttggtcaatcttttttatcgccggtttttttctcccatgcgctagctttttgtttttctcatccggttttataatctcatctgttcaccgcacgccttccgaggtgaaccctagcgctacgccaccgccatatcgattgtatgttttctcctccaatttgattgaaaaatcgattcctcactcctctcatcattttctccatgattttccctttgattcggctttaattgtcggatttaatcactgttctacaggtgccgatgatgacggcgatcttccttggtcatttttatccgagttttacgctttgatttttgggtaaaaagagtagatcgagtggattaaaaaccctcgaccaattttggtttaccaagaaagattcggctggatttgattgggagatttgctctagcaaacgtgtgtgcacaggattatcttcgagaggttgaagatggtaatcacatttgaaagttgaagatggtagggtcggaaaccggtagcaaatacagaaacattaaattataaaaacatatatttaactttacataagtatgttatatgtatacataaattcaaacttatactatataaattataaattaactccattttagtcatgcacaaaagttagagatttgattgaagagtcaatcaatatgtaagctatgggtcaagtagagacatgccctataaatatcgacatatttagaatacggtaattaccatattacaagaaacgataatttccacaagaatacggtaaatacggaaatgatcagtataacagcaaaaccatttctgttttcatttccatattttttaccatttccatttttgtttcggtcgattaccatttccatatggctcggccggtagaaagtcgaaaacgaacgccggtcggccgggaattaccgttaccgttttcacccctaatgtaaggtcatgtaaaggctgtgttcgattgtggggttcccaacccctctcccgcagcacacaaaacgaagcggaagtttagcgtataattaattaaatattagctaatgatctataaaataaattaatatttctatagaatattttataaaaaaaatacatcgtgtagcagtttgaaaaatgtacgcgtgaaaaacaagtaactaaagttggaattcaccaaagaacacagagctagagactaaccaagcactatcatattcccaaattttaatagcatagtaggtggatctaggaaggataaatttgtcttttcctaactcagagcttcagatctatttttgaatttggaactctacgatacaggccctaattcactcatatgtcttgcacttcacattgactttttcacaaagagttaggacctcatcttttcacttatgcttatacttatgagccaaaacttgaattttccaactttaaaattgaagctgatttaaggttttttcatcgaagtttatttttcagcttttacttttagatcactaagaacacatatataaaaattttattcacaaactacttttcatttgcaaatatgccgtttctcttaaaatctacgaataagcgaaatgatgggaccgttaattttctcgttctgtgtgtgtttggtgtcctcaatgtcagcctctcacctttactattctctccgtttcaggttataagacgttttgactttaatcaaagtcaaactgttttaagtttgaccaagtttgtagaaaaaagtagtaacattttcaacccaagataaatttattatgaaaatatattcaattattgatttgatgaaactaatttagtgttatatattactatatttatctataaacttggtttaacttgaaattgactttaaccaaattcaaaacgtcttataatggggtatattatatggcaatgctatagggtggctaaaagctaaaagtttcaaattttatttttctacacacatggcttatgataaattaatggctgttgtttaaacttaattgctcatttggaacgtaggatttgaaaattgtagcaataagaaaattataggattagaataccacgtatggacaaatcctgcaggaattgaaaatataggaatctagcacatatcacgtttggacggttcacaagaatataacgctaggtatctaatggaattaagagagaaaaatagataaagagagaagaacaagcattggacttcttaaaggaaaaaaaaggtttgagctcttggtaaaatttcctatagaattagtgcataggatggtaatccatatgaaactgatatactaaaaaattctgtttcaaacaaaacatatagaaaaaagttcctaagatttaaaatcatttgaatttccttcaatccaaagttgactaaaaacttttaaagaccaaagtatgtcttaaaaatatcaattgcggatgtcagtgtaggatctgccatggagatcgtaaggttccaagcactagtaccgatattgcaaccatatgagcaatcattgagtctccattaattttttctgtcatatactatctctattataaaatatagcaacctctaaaaatacgaatctggacatgaagatttgtagtctaggataggtcttatcccatcgtttaagttgctacattctagaacgaagggaatatctattagaagggggctatagttttgtatagtttgtcggtccgtcttatcctatatacctatacaagtcatccccactaagtgcaattaaaactaattttttgttctgagagtaagccacgtcaccttgattcattccagccatcggattgcacataaacgtttggatagcaatcaatcaatcaactggggatagcaatcaaaataaacatttagcaacaactaattaaagaggcccacctagccatctcttaatttcgaaacatacagttggaataccaacagcaacacatgtagtagcccagcagttataagctctttaatcttccattgaagttattttatctcctgtaaccggtgaatcagatgaacagtcggtcttcatgcctttatatactctctataattcactgggactttgttctcgattgatcatctgtgcttggcagtctttccatgcatctagttgatttatttgcccactcctctgctcatgctgatgcttcaacagatcaacatgcacaatccgctttggtcatctctctcttgcttgcttgctcatggatttatttttctttttcttactaatatcatttgttgtttagttgtagaatctgaagagaagaaaagaagtagtagtttcaaatatttcttaactttctgttctttgtgaaggttgcagatcttatagagagaattgaagggttggtgcattactatattcacataccggttgaaataataagaacaatttttttttcagttggttaaaataaataagaatacctttttgtttcagtaggttattgacatcttcgactgaacttttgaaagtttctacttcattaaaactatagtttggaataagcaattacatagcatctttgtgtaatcacgatgacgtatattgtctaccatttttctgtcttgctacatagcatagaacaatctatgttagttttttttttgtaataatagaacaatctatgttagtaccattcaatttattgcatctgtgttcaattggccttagttctagtaaaaggaattggcctttcactagacaatcagcgtattctgttatgattcaaatttcagttgcttattattataacattggtgaagtgttcagtgtataacaatacaatcattcatacctaattttttatctttatattactcttgtatttccgcagcaacgcgcggggtgtcatctagttagatattcttggatccgctcgtaactgcgtttgaattgatgatggaagtttcaaagtactagtgttatggatcagatcattaacatgtattaacccatattggtacactcgtgcacacacgatgggccctgtcttaaactatgcgaccaggatgtatcaagacaagcagttagcttaaccactaagcttagctttgaactcatcgatggcgatgagaacttcaagtcttcggtcgtcaagtcacactcaagagtctcacgttatacgacagaaaacacgctttcaaacatggaaaacctccatctcccctcgggcactcgaaacacaccaaaaactcccaaattccccctacttcaaacgcgtcgatacccaaagagagaaaaataaagaggggaaattcaaaacctcccccaaaaccctcgccccaccgccgccgcccccgccgccatggacagggcaccgccgcgcggcgccccgcgcgacgccgtcggccagcggtggctcgccgtcttcgtcttccaggccgcgctctcagccgcggcctccgcgctctacctcgccgcgtccccgcgccgccgccacgcccgcctcggcgtgccccggggcctcctcctcgcgctccacccgttcctctccctggccgccacggggctcctcgcgctcgccttcctcgtctccgcgtcgccccacccgcgcgctccccccgtgccgcgccgcgccctcgcggcgtccctcctcgccgccgccggggcgctctgcgtgggcgccgccgcgtcgctggtacccgaggactccgggtgggcggctgttgctgggatggagttccgcggcgctgtgttgggagccgtgttcgccgcgcactatttcgggcgtcggaggtggttgctccagttccccgttgtgcaggtcagtgaagtggggaaaagtagggttctcatctagaatggcgttccgaatcttatcaaattgccaaatggctgtagctcctaatagaggtattgcgactatagagatcggaattttaggtttaaagttagcttgttacgattttagattacctacttaggtatgattgatggtgctggtgattttttgttattgaatctaagcatggatgtttttgataactgtggcttgtattattggtatgttgggtctaagattctttgtgatttgttccgagtttaactggttcccacttcccactagagagcttcatgaattgatcaaatgattagggaatagctgctagcacctctgtaatattcaggttgatatacattggacatacatgtgctattctcagatgagaaatttgattatcatgtttgataagacactatagcgctgttttataattctccagaatatacgatattcagaatccacatgcatgagctgtagtttgctttgatagttattgatagagaagtttttatccatctagatcttttttggggagacatggtttatattgatctaaattatatgtgcaattctctgatatctatagctctgtttggttaatttttttgcccttgcgattttttaggcttgcatgttgtttacttgcaatccttcagcacttcccaccaattttgccaattgtcttacttgctttcttaatttgttttttgtccagcgacctccgttctatggtttgaaaatggggcttctgccatctggaaaaagggctctgaaggtgtcacttcaggccttcttcctttcctttatcttgattttcgttcttcctcagcaattcagaatcagaggatccattggaagccaaattatcgcccaaatcggtatttttataatgagcactgccgttgccttctgttgggaaataagtcatcattttgtccaggtttgttcttcacaatccaacttcaaaggaaaaaagatgttatatgatgtacttgttgtattgcctggaatgcggagattgacgtcatttcctgaaactttatagttcataaccataattcaactgctttcaacaaatttcaggttgtgcatacaagaaggtgcagtttcgctccaccacagagcactgctgctgcagagactaatcctactgagtatatcctagaaacattggaactgagtgatccaagatcactaatgcagtatcttgcataccaagatttgtgtgctgtatctgaatgtaacttagaaccatggcgtcgagcggccttctttgaggaatctggtgagacttacaaaagaattgtgacagcttgtttgaagccgcttgaggagttcacgtcaaaaattgctgaagctcttgaagggttttctagtgagaaaccagaattgttgtcacaacagttcaaacttgctgctgcatttaatgattcacaggtaagttactcatcagtttcttctatctgttttacctcttatgttgtgttcggctgttttcctgtttttttttccaaattgttaatcatgtttgcatttgtgttgatatagaacatgaaatggttcctttgtttaggagttaagaccaaaaacagttggatcttactgtagaatcagttcggtgtttactgtttgttttttgctttgtcactcatgacagattatctagagttgaattaaatgtacgtactataatcttaactgcaccacattggttagtgatacacatacataatgactagatctgcatccaggaagatctgcttgtaaaggttagtatcatagtttgaagtgttcagacttcagacatcttaggagttcattttgagattgatagcttgtgagtgctgatgtctactttatttataaccagtctaatttgtggcaacacatttagttctagtggatgataattggatatttagtgagtgttaactatcatcatgtgagattgtggtctctaaaaaaaattgcccagcactgcaacagacaatagcatatgcactctcctgcagcaattttggacatttgggcgtgtgggatgtcttggtattactgtcatacattggtctcacgtggatgtcctgtattctatttcattggtatagtggaagtgaataatccatttatgcttcttattttagctttacaattgagcaagtttaagtttggtggttttggtctttagcaggtgaccattaacttaggaagcatgttttgcttcagaaaacaggctagtaattgtggtaggaagacattgttttatttgacaaaatcataacagtacctttgcaactacttctgtagttggaatattttttggtatttacaacataattgaacattttgtccgttatggctagaacacgtagcaccctgactatggctgaaatggaggctgccagcaggtatgttgggttgctatctggaaccatgcaaaatagcattccatttgttagctgctccagctttttctgtatgttgggtcaattaggtcatgctttacccatatttttagtttagcatcagatggccgttcatacagattataaactccctcctgtcaagaaactagaccgtttggagattatcgttttgttcacaaaagcaagacatctggaaagatttggggtcatttggccacctatgccccttattaaatgactttatgcatgctaagttgaaatttctagaggaagttaattgcgacagtattatgacaagtcactgattaatcattccttggtagatgcaaacaagccccaaacattttcctttgctgactgaagggagtattgtttccacaaatttgtgattttggtagcattccgaatggttgaattgtcaacagtgttgaccacgtccagactagttcctcaaatgtttctatgtttgataattcctgatgaaaagttaatgtgtggcttgttacatgtagatatgcacatggtgcgctcggacattgtcatctttaactgcacggtcacgccaagaagatcggtatggagttgctcaactcacaggctgcaatgctgctgtgatgtctactttgctgtctgcgctagttgccgttgaggcctgtttggggaagaaaactaacccacaacctgcgcactcactgggtccagcaagcattaagtgggctaacttttccaccgggagaaaaggcaatgtaactgccattgcaagcacgcaaagaggtggtcttcacactaaagctttttccatggccgatgttattcgaacttcgatctatcagatggtttcagcctttgagcatgacatgcgggcaaatgctaaagcatcaagtttggagaagaactggatcagtgaaggaagaaaacctgtatttggttcacaggctgtgttggttcagaagctgagcctgtttattgagtaccgtgctgtctgaacttggcatcctgtaccaaatccttaccggccatttaaattattcttggatgaaggttatttcgttttggatttggatgggagagtttgtttgactatgaatctttcgaacagattatgactctcattcaggttcagggggccaatattttatatcaagaacgacttggatagtggcattttctgctcataatcgtcaggatgtaagaaagacatgaattgttatacctatggagagcttttcaaaagataattacatttctccactgggaaaaagccacgctggttttgaaaaactatgccggtgaacctgctgtatactacttttcattttctcaccctggagttgtaatctgtatgttgtcatgggagaaggaaaccagagctgtgctgaactcaataggcttattggaattttcgttctcacaatgtaacttgtttgttagtcttacccacttaacagcttcacctgaagttctagtcaaattctaatgctttcattgatttacgtgatgttgtcgcctaatcttacattttcattttgggttacttgttacagctttgagccatttgaaatttgagttggcaaaactcccttgtgctttttctatgacagtttcatgatttcatcttggatcaaaactcagaaggcacatcctggaagaggcgtactttctaattgagcattctaactatccacctcatcaatcgtggatttatgttacaacaagctcacccaacaaattaccacggacagtggaaatggaccaccaaacagcgaaaatgccggtcattcagagtacttatgtacagacgggtaaacacgttgcttcgactgcaactatcaccaaactttctactacctagttaacgacgagaaacttagctgccaccccctccggcctcgccggcgcggccagcggcggccgcctcggcgaggcggcgagcatcgagagggcggccctcgcggtcgccttcttggcgccggcgacgacggccttggggcaatgccggcgcggcgacaggacgcgcccgcggtgcgcgtccaggcctcccccgcagctctgcgacggcttgaggcgcttcctcggcggcttcgccaggtcctccagcgaggcgaccgccgccagcgacgcgaacgactgcgactttccgtcgaagaacctcgacaaccccctcctgcaaacgaaaaaaatgaaaaaaaaaaacactccggtgtcagctcagctagctcaaggatcatcaaagatcaagaagaacgcgaccagctagagcaaacggcacgcacttgaacgggagctgcgtcatgaggtcggacatctcgaagcggcgctccgccgagctggaggaggaggaggagctcgcgtcgtcggcgagctccgaggacgaccccgacgaccgcgccgagctccccgccgacgtggacggcgacccgatatcctcctcctgctcctcgcaatccgccgcgccgccgcgccggcaccacgcgtacgcgtccatgtatatatccccaactcttgactctccccgaccaacgccgatctcagatcaaggcaagcgaacgcagctcagatcgatcaaagcaacaaccgagccgtgtcgtcgtcgactggtggaaagaaggcagctggtacaaattataaaggtgtggaggaggaggaggagaccgtggccgtggtggcgaggtgagtcactgctggcagaggaggataagaacgagcgagaactgaagtagtagcggagagcgtacgcgaggcgagcggatgagataaaagaagaaaaaaaacaccggtcgtttatttgtttatcgcgtgtgcggcgcggtagggaagggaaggagtaaaaactaaaaaatagattcggcgttatcgcttttcttttgggttttttatccgctgggttcggcgttcgaattcttgctctccgttttttttttctttttccggagaacggggggagggggagagagtggataaggcctccacatgcgtatacgtgtgttcccgcgcgcgcgggcgcatcggaggccacacgcgacgcgatgctgctgcgtgcggctgaggctataggctagcggagtggagtagtagtagcgagtgggcgttgcttgtgattgggggaaacggaggagggccacacgctttacagccacatctttttaacctaagctaatgcttagtactcctatcagttaaaatttttttttaaccaatttaaggttattttatcgaaatttactttctaaattttttgcttttagattcttaagaacaatacgtaaatgtttattcataaattatttttaattttcttttgtaaatactacctccgtcccaaaataagtgcagccgtgaatatccgtgcccaacatttgaccgtccgtcttatttaaaaaatttatgaaaaatttaaaaatatttagtcaaacataaaatactattcatattttatcatctaatagcaataaaaatactaatcataaaaaaaatttaaataagacaaacggtaaacgtgaatagtgtaaaaccgtatttattttggaacggagggagtatgttattttgtttattcatgtataaaccaaacaatggtgccattaattcccgcctgcgccacgcgggtttgtgcagtccacctgctacggattttacttggatagtgcgggctgtgcggctactactacaaatgtgtgtttcgatttaccttgcgcgcgtggcgttcccatcttgttcttccgctgttgctcgtatagtggagtggactgctcgtacttgtggagtactgctctcttatatttaaaggatatatcttaaaatgtgtatgagctttgccctaaagcccattacaaaaatttgattatcaaacaaactaaacgcacaacgagcaacggcatgtgttcattaatcattatgttagtactttttagctagaagcctagaaccgcatcaaagtggcaagatggctttagcctttagttgtccaacagcagtagtatcgatggtacgtaagcttaataggacaaagacagaccatatgtggcatccatttccttttgtctaaaatatgtccccttttgctaaagaacaaatgtacatttgcaacctttctcaaaacataattaaaaaaatgcatgctatttgtcattgtatgatggaatatgccagatccggtaatctgcgactattataagtgtggaacaaacaacttgctactcctttgcaccactgttaccctcctgacagtgaaagaaacacaaagaaagctgcagctagctgagatgagactgtctctaatttaagaagagattattgacatagtctccaaaaaaaagagttaaatgaggatgattctctgtgtacttatcgcgcttcattacgagatgccgattgtgcaaagctgactcagctgacctggtaattgcccccctgaccactaactcgtggtccaatcttcacttttggtcttcgttgtatatcctttcaacaatatggggtacttatcctttcctacgacttgaatttataagctatatggtgatggttacattgggtatgaaatggatatgataatgaaagttggctctataatgagtccatggttttgtttggaggtgaggtgtgaatacactaagttttttactttctccgcttcatattataagaatttataacattacccacattcatatatatattaataaatctagacatatatttgtgtctagatttattaacatctatatgaaggtggacaatgctagaaagtcttataaactaaaacggaggtagtagcttctaacttctaattcattttcttaattttataattacatctttactcctttaaatgtatcttatggttgtgctggtgagtctgtctcaccaccaccacccaatatttggccccacataaatagtattcttaaaatcttgaggatttatattaggagtcggaaattctaaaacaagtagagccgctatggcaagggggaaaaatgtactactggtagagtctacttgtgattaattaaagtaggaaagcaggattagtgcgctaatcgattaagtcttatccgccgctaagtcaacagagtactacactactaatgaacttgcctgtgataacaaaggtacgaatccattcgttcgttctcctagtcacacacaagaggtagtataagaaaggcgaaagcaagtcctttttttgcgacagggttgtaatcttcgggcccaaacccgggaatgccatcattctgatttctggggggcaacattgacgacaccatgacgggttaattaggtaataaaataaactcgaggagttcgcaagcgaaagcatcgatcagaagacgatgacaatttatttaccctttgcctgacggtaatcaacgccgatcaactgtagtatactgaaaaaaatagagagaacattttgacacccaacgcgcgggaacaaatcgaaatgaagtagtatgaaactgtgcagcactcacggaccaatcaccaatttgagtctccgcgagaaacaaacaatcaccaatttgaagatttgtgtattttggatggatttcgggcatggtgcagcgagccaagctgtttttagggtgggcgcttgggccgtactgcacatttcatacatacgggccaggctgaaaaggcaagcctagttctgggctgaaacaagcccaccattgcttgcaacaaattcagctcaacatctcagaacaaagaacgttcatatttcaaaatccgaatcactccagcaacgaaatgagaaatacaggagacaaatttaattttcgcaaggattagaatcacatcatttcatctacggaaatgagcaagactgacaagtgagtgagtgacaacatggagtaataaaccgagtttctaagcatcaaactgaagattgtgtgggcttgtggcaatttatttgccttcagctaacagtagcaacaccaaccaagcatggtaaatacgtacgttttgactgccatttcccacaaacaaatcagcacgaaatcacattagcattcaagaaccaatcgccaattcgaaactttgttgtgttttttttctgcagcatagttcgaacttcgtatacagagatactaccactattctgttgcttttagatgattctctcaactactgtacgtgcttcaacaacagcttaccccttgttgcaaattcagatcagcattcacatctcaaatcacagcagcaacgggatcagaaatgcaggaaacaaataattttgctacgattgaaatcgtaatgtcattacatctatggaaatgagcaaatcacaaccaggagttgggatactactaatcctactactaaaaacccacccgtggcacatccgggtctctctacaccagcaaagcaaaaggacacaacaagagctaaaacaccagcaacagccagtccaggaggcggcggcggcagaggcggccagcgcgagggcgagggaggaccggagggctcagccgccgaagccgtagagggtgcggccctggcgcttgagcgcgtagacgacgtccatggcggtgacggtcttgcggcgggcgtgctccgtgtaggtgacggcgtcgcggatgacgttctcgaggaagatcttgagcacgccgcgggtctcctcgtagatgagcccggagatgcgcttcacgccccccctcctcgccagcctccggatcgccggcttggtgatcccctggatgttgtcgcggagcaccttgcggtggcgcttcgccccgcccttgcccagccccttgcctcccttgccgcgcccagacatcgccggagaccgagacgagaccgagacgaatccgagatggaagaagagagaagtctactacttggggagatctgaaatcgctgtggctcttggtgagatggatttggatttgggggtggttttatagaattttggggggattttgagtttgtgtttgggcgggagaatttttggggatagatttgcgcttttggtgggtgggtttgggacgttggattggtggtggacgggcgcgatgggttggggtgtgtttccgtggattgatgacgtggtgggaggcgcggggatggatccgtgggtggggggaggattgccgttggattgaatcggatggtggggaagctcgtcgttgcgagtggagcggatcggtgacgtggcaatggttctgtggccaggcgaggaacgtgggctgggccgggccgccggttttagctcggtctcctgatcagtcacgaggcccgtagcgtcaagtcaccggcccaccaccaccgtccggcgaataaacccgccgcctctcgtttcgccgccgccgccgtcgtcgccgtcgccgtcgccatctccaggtgggtgctatagcgataggctatggctttcgcgccgtccgcgcggagggtctcggccgtgctgtaccactacccgtgcccggacggcgcgttcgcggcgctcgccgcgcacctctacttctccgccgccgcgctccccgtctgcttcttccccaacaccgtctacgaccccatcaggtaaatcttctgtaacttaagagatcgacctttgggccttcgaactactagtttctgcttccaatgttcttctcctccataggttcgtttgaagagatgtgaaatcggcaggaagctgcaagcgagtacaactcttcctttacaatgtctaactgtagtttcagttcgtttagaccgaccaacatctgtggagctgctcaatgttcactttggcattgctttgcgcttattaagctttccctttgtattttagtgggagaaaattgcatctagttggcattctgacaagtccctttttggaggggaaagattatgctttggggtttctattctgtagtgacgtttggtatagtcaggcctaggtgaaatatacatttttttcccggatttcaatatttcatgaattatgaaaatgatgaatgggaggtcaaaattgaacaaagctgtttgatgattttgtcatgatatgagcctctgcacagcagatacagtgatgctcaagtgtttctctttactatagcattattcttactgttaccctctctgtaggagtgatgctcttccatttgatgaaatcaaagatgtttatctcctagactttgtcgggcctcctggttttgtcactgatattgccccaaaagtcgagaggtttgtaagcatttatctactgctatttgctttaagttttgttctgtgtgtgttagtttcatgtgcattatgctgttaatcttggattcttagaaataagattcagcctatgttcattctgtcattcatttaatatacagattcgatttccgtacacttcatgagtagattcagtatattctgtaaaatattttggggaaacacattgtggccatcaactgttctgaatattgctgaactgtagattgtagaagttatgcatcaatatttctatacattctgaattgttttgtagaatattctatccctaatgctaggacaattctaatgtttttatcttgttcagtgtcacaatcttggatcatcataaaactgcctttgaaagtttatgcgggaaccccacactcggagaaaatgtcaataaggtgattgacatgcaacgcagtggagcaacaatcgcatttgatttctttagcaacaaactcttgacaataggtagtagtttatggaatcatagaagtggcaattcttttaatggggtgaaatatctacctgataacaagcttgaaaccgtacacaagcttttcaagtttatagaggatggggatctgtggagatggaccattccgaatagcaaggccttcagcagtggcctgaaagatttggacattgagtttgatgtcaatatcaacagaaagttgtttgatcaggcaagtaacttggtactagtgttctgctacagtagcatatcctcattaaaaattcatggtacaaatctagcaccaccacttttgcatcactaaacctatatattgctagcctaattgttggttaaaaacaaagtctagatcttaaaatacattagtgccttctatacttggacagaatgattattgatgttgtcctactatacgagagctgttacaaaacattgaaatcaccgagctagccatcataccaaaatgctttttcatccaaagcttgtattgttttggtccaataacttcctgtgaagtggtattgttgcagttactggaactggatcctgaggaagtcatttctcgtggacaagcaacattgtcacacaagcaaaaattaattgatgaatgtctggagaaatcctatgaaattgcattaggatgtggcaggttcggtaattgtctggtaaatacctgcaggttttccttttctcttgattattttgtatgttcattaatattctattcatgttttgtcaacattctattatgtgaaggtgaatcgtccctacattcgtctataaattctgttatactacttgtttgatggggctgttgttgcaatttatgatggtccatgagctatatgtttgatccaaattagcacatttccagtaaactggatcagtagctatatttcgtgaccagggattaaaatttgacatattacaagaaaaaatcctgtggtcttttttggtacacgtagctttccagttccaggttctggaaccatctggtgtgcaactccactatccttacataaccaggacgtatcttttttccattagttctgcatgttttttttatttgtgcaatcattcccacctgaatttcaagatagcttacttatggtagctttatggttcgccgccatcgaatttgaggttctcttattatagcttaatactttactgatgcagaggcatgcaaccattcctacagcctaatgtctcagtatccgtaatactttttactctctttgtttgcattttaccaacattacaggctctgctgaattatatttttattgacccttaggctgtcaacgctgatgcaatttcaaatttgagaagcgaacttggaaatcagctagctgacaagagtcgtaatttaaatctgaggcaagttttctgttcaacctctccatgttgatgaacaatccatattgtttcttcaaagcgctatgttgttctaacacgaaccaatggtaccttctccagaagtattggcgctgtagtgtacaaagtacctgagttgaataatgacaatatgctgaaaataagtcttagaagtttgaacgaggaagacactacttctatctctaaggtacttcatcctccgatcaaatctataaggctgtaaagtagcatctgaaaatgatctattttaaggctgttgatttgttggcgtttgactctttttgtaggaatacggtggtggggggcatcggaatgcaagctcatttttgttgagcgttactgagttcgacaggtggaaggttggagctgaaccttgcaacactaaaatgtaagaacttcatcaacaaattgaatggttcataaagaaggaaatgcaggatgttacacaaaagcacaaaatggaaaaaacatcaagtcctaggccctgttcttttgttttcttagctaggaccagccgtgtctagctatctaggcacatgcacatccggtcagtggcgtgcctgtggttcatgaacatgagcccccagtatcattgtaagaaaaaaaaaactgtcagggtcgttttgaacatttttgttggagaagccaattgttagggactgactaggcgttgatcggctgatcgctattaaaggtgttttgaacgattagttgtcacaagcaagtactccctctatcaaaaaaaaattaagctaggagatcctagtagaacgaatttgtattaggagaaatctcctaggttgagttttttttaagacggagggagtagaccggatgcgacggtatgattcatgacatgaactgagcatgaagggaacaggcttggggcatgatcggatggctcatagggcgttcaaagtgcaaggacgtggccttcagccccatagaaaaaaacgaatattcagcgccacatcagcggtacgcgaagccaaacgaggttctcgtagccaaacatggatgctcgttcttcgttcgtcgaacgacttgcggagggcgaagaaagggtgaactgccgcgttgtggagggcggagcctcgcgggcgtggcttcgcatcagcgagggaaataacccccctttcccgcgctcacctcaccagagagaggagcggcgccgccaacggggagagaggagagcgtcgcggggctcatcgcggcccccgcctttgcgacggcctccgctggctacccctcgatctgcgcccactggagtttgtcggccacgctgccccgaccgcgataacctgcgcttgctgccggccgcaccgcccctcgatctgcacccgccggagctcgccggccacgccgccccccgatccgcgacgacctccgcttgctgtcggtcgcgccgcccctcgatctgcacccgccgcagctcatcggccacaccgcccctcgatccgcgacgacctccgctcactgctggccgcgctaccccttgatccgcggtggtcgaaagaagaggggaggtgctcgagccaccccgctgcccagacgccgttgagctcccgtcgtcctctgctatcgcgccgccgagctcccgcagtcccccactactgcgccgccgaccttgccgttgttgcaccggcaagcgccaagccctgccgctgctctgcccggtgatgtcgctgcttgggccgcttgggccgctcgggccgtcgccatctccgcccggcatgctctctgctgtgggaattttttttatttataatttttcttattaaaagttttacaaaaataattttccattttgaaaattgacggaaatagtcgcctaccgccctctgggagggcgatttttaaaaatcgccctcccagagggcggcgaaaatgacgtggcagacggccgttcgctctcgggcgacggccgtcaacgaaatttgcaggcggcccccttgccgccctccgcgagggcgattttgtactgtgcggggggccgcctgcaaatgggcggcgagggggggcatggaaatttgcaggcggcccccttgccgccctccgcgagggcgattttgcactgtgcggggggccgcctgcaaatgggcggcgagggggcatggaattttgcaggcggcccccttgccgccctgggggagggcgatttttgcctcccccctataaagcccagcccctcccctatgaaatttcattatattcactaaaaatccaaaaaaaacgaaagagagagagaggggagggcagcagaaggggagcggcgaagccctgctggttcgctcacttcatcacaggtatgctcccatacatcttttgcatttgtactaatatattacgtttgagtacatatgttgcgttttagttttagttccatatattttagcagatctgtagcacacagcacatatgtgtagatccagagcatagaatataatagtatgaattgagacatagacagtagtgttaattgtaagatgtagtttagtttgatctggagaatgtaacctacttttagaaatttagagaacaatattgtagagaatgtaacttagggcgtagtacagaaatgcgaggttaacgcagttattgttttcatcaggcacaatgtcaagtaaggtcacatttcagatagttcacggtgaaggaaatattagatttggtccagatggtgttgatctgtcagattttgtaatgacatctaagggcatcgataggcctgcggagagaacatttcagtcaatttatagttggttgttgagaggatttagaatagaccaagaagtctacacaatgtcagtatctgttgtagtgagtcgtgcaatagaaggttatttttgggaactaatgccgatggacagcactgctgcttggaaacggtatgtggaaatggcttttgaacggtcatggcccctcgttatatttgtgtcggtacaagagaaagatacaaatgtttcaatgcaaaccgaagatgtggagggtcctagcaatgcaggggatgttgttggaccatcgatgcaaaatgaggaaaatcaaccaagggaggagcaggccatgggcatggcggatgagggggagagagtcggtataattgttgatgaaatggagagggaagattcggataatgagcaagcggaggacgacgcatcatccgatgaggaaggtgatgtaatggccactgattgggcaaatgaggacttctctggtcttgttatatcagagggtgatcatgtaccctgggagtataaggagtacgaggtaattgagggtgcaaggtatgctcataaggatgagatgaaggaggcggtgaagcattgggcagtttcattgcagagagagtttagggtggtcaagtcaacaaattatgtgtatgaagtgaggtgcatgaaggaagattgtccgtggcgtgtccatgcatataagggtaaatggaatgattattggaaagttagcattgtgaccgagcacaagtgctacttacaaggggtggagaagtatcaccgaaacatcacttcagcttttgtggcaagtgagatgtacagcagtgttgttggtaacattggctttgaaccaaaatcaattattaggcacatcgagaacaaattcaagtacaccataagctatgcaaaggcctggagagccaaacaaaagatcattgagatgaggtatggcacatttgaagcttcttatgataatttgcctcgtttgttagccaccattgcccagaggaataataatacttactatgacctacatacatttacatcggttgaagatagaacaaagagtgtgctgcaaagagcctttttctcattgggtgcttgcatcaatgcttttgtgcattgtcgacctgttctatgcatagatggaacttttatgacaggtaaataccgaggtcagatattgacagcaattgggtgtgatgggaacaaccaggttctacctatggcttttgcatttgtagagagtgagaacactgaaagctggtactggttcctagagagagtgcacattgcagtggtgcgtatgaggcccaacgtttgccttatacatgatcgtcatgcgggtatgttgcgggctattgactacttgcagaacggttgggatgagaagggacttccagctaagtggcctgatgttcggagtcggtggtgcatgcgtcacatgggtgcaaatttctacaagcaattcaagaacaagcatcttatggagctctttaagaggctctgtgcacagaaccaagagaagaaatttaatgagttgtgggacaagttggatgagttgacaacgaagcaaacagatgagcaatctcgcagaccacaagttgaaggtgacgagcctcccatacctcttggtgcattacatgatgacccaccaacaatgagaaggaggtcagggtcggccatcagaaatttctctcagtggattgagaatgagcctaaggagaagtgggctctattgttcgacaccgatggatctcggtatggcataatgacaaccaatttggcagaggtgtacaactgggtaatgcgaggagttcgggtacttccattggttgctattgttgaattcatccttcacggcacgcaagcctactttagggatcgatacaagaaaattggtccgtccatggccgataacaacatagtgtttggcaacgtagtgacaaagtacatggaagataaaatcaaaaaggcacggagacatagagttgttgctcaaggcacacaagtgcatcggtatgaaataatgtgtgttgataggagcaggcgtggtatctatcgcaagcaagccgtgcaggaatgtgtcttgaaggcggatggtggatgtacctgcagttgtatgaagccgaagcttcatcaccttccttgctcacacgttcttgctgctgccggtgattgtggcatatctcccaatgtgtacgtctcaaattatttcaggaaagaagcaatctttcatacatggagtgaggagatatatgggttcgggatctcaggatcttacacaacgctgagtgcccaagttttttatatttcagatccatctaagtttagggtgaaaaagggtcgacgccaaactagacgcatcagaaatgatatggatgagtcagaagcaggtaggaggactttacgctgcagcaagtgtgatctgcgcggccatacttacaagacatgcccgaagaatgcagaagttccaagcggcgcagatgctagtccatctggacaggcaagtgatggtaggcgaccacctggtgaaggaacaacaagcaggcgcgcaaggccaaggcgtcgtcgcgcagcaggcgattccatggtgtaacaatgctttcgatttaggaaataaaatgatgtaatgagtgttcggactaaatacttctatcgtgtaatttcaattcaatcttgttgtaatgagtacctccgactattgttgtactagtagtattgcgaactattcggtgttgtatcataatgttatcgtgatgagtgttcggactaaacacttttgtttgtttgtactcttgtttaatatgtgttagtaattcgcttatgaacatttattacttatgttgaactaattatttatatgtttctgatcaacctatttgatgcaggtatggcgtacgacacaccggcactgttgaaccgtgggattgacaggaaccaccgctcgttcctgtcagcagtcgagggtgcacagctcggcaccttccgtccacgcacgtcgcgcgagtggttgcgtgtcgacccccgtcacgttccttggtacgcgtatgttcacatttcaactcaactttgctttgttttatacttatgtttgaagtttgctctatacaggttgcgtgcggcaggccttctaccactttgtaggcttgttgaggcggcggcggacgaccgtgacccagcgaagcggtgggatgcagaccggtcactccttgccgctcttgtagaccgctggagacctgagacgcacacgttccaccttccctgtggggagatggctccgacactgcaggacgtgtcgtacctgctcgggctaccgctggcgggagcaccagttggtcccgtcgacggtgtttttgggtggaaggaggatatcactgcgcgcttcgagcaggtgatgcgccttccacacctaggaccgaccaccacccttcctccgtactctacagtcgggcctagcaaggcttggttgctccagttcactgtaagtaaataagttgttattatcatacgtgcttatttgcgaccggatcagtgttttgtactaacatttcattcttaactgtaggcggaccttctgcaccctgacgctgatgattactcggtccgacgctcccttgaggcgtacctgttgtggttgttcgggtgggtgatgttcactagcacccacgggcacgctgtggacttccggctggtccactacgcacggtccatcgcggatgctcagccacaggacgtgccgcagtggagctggggttctgccgtgctagcagccacgtaccgtgccctctgtgaggcgtgcacgaagactgacgcgggagcgatcatcgctggctgtcctatgttgcttcagctttgggcagccgagaggtttgccatagggcgaccagtggtggacagcgcaccctacggggttggtcgcagcgcgcagtggccagaggacggtcccacgatggggacttactggtgtcgacgtggggttagtgcaacttcgtgtctaattccgatcatgtttattgcagcgtcgttacgctcacgtccaggtgagacgtggttacccggacttcgtgttcgagtttgaccgtctccagccgagcgacgtcatctgggagccgtacacagaagaggccgtcgctgcgagagcaccgctaggactttcgtccttgtgcacacgcgaccaggcttactggctcaccatcctgccgatggtgttcgacattttcgttgagcctcactggccgcagcgtgtgatgagacagttcggacttaggcaggtgtttcccggcaacgtgcagccgaccgtcccccctgccgaccactcgtgagttcggattgttcatttctaaatttttatgataattacatcatcgagccatacaatttacctctcttcacaggttgactcgacggggacagctagcaggcgcactttgggctccacgtgtacagcagtacgttgacgactgggtgttagctacagaggaggtgatcaacgagctcttcccacacacggaggagaactaccgtgactaccttcgctggtaccttcctcgcactcgtgcgcgtgtgaccttcactccagacgccccagagccgcacgttgccgctgtcacggacgcgtatcccacgcaccgtgaccgagactacttcgtggcggtacgtccaatttgtattacttccaacaattatgtcatttatcttgcataatataggacaactactgaattttttatttccatcttgcataggctgatgcggcacgggatatcagtgccgatatcaccgcagtccaggtgaggttgaacagaggtttgcacttgactgacgttgagcagaggtcgaccttcgaccggatgcaggagaagatgcgtgcggtcatgcgcgtcttctcctgtcgcagcgccgtggacgtcgtacctccagctggtccggtacacccacggcctcgcggtcctaccgtcggagcaggacctcgtttgtcttcgagcgcccctagcttcggagcagtgcgacctacagcaccggtttcgcacggtacagttcagcccagatattagttcatttttgtttcagcttttgcacgaatgtgtcaccatgttttaactgcacgtttcctcatcgcaggacctcgtatgccttcgagcgcgttcgcaggcacgaccggcgcttccgcgagctccgcaggggcgttcgccacctcttcaggcgcgttcgtcagctcttcctctcacggagcgtcgatccctcgcccacacggtactttactttttattaatactgttaaatacctatacgaaactgatggtccttgtccagcaggatttgcagccgggatcttcggtactggggcctcttcgtctcacgccggtaggactggtcctactagccagttctacgacgacgacttgcacggtgcagaccaccaggacgtactaggctcctctcagcttggaggagctccagaggcgcacactcaggagcagccagaggtcacacctgtacaggcaggacgggttggccgtgccgtacccccggaccgactcacgtactcccaggggcacattagggcgcagggtaggagggacaggggtaagaggcctcgtcagtagtgttctacctcttcagtccttatgtgaccgtttcttttggcttacaaacttgtaaagcagtacttacttttgctattactactgcagtactacttgtgtttgtctcgtctacgtagttcttttcattcgtatggtgcttgaacaacttatgctcacaacaacacactttcggcgcttcacggtagtgccatatccagtagcgcgcacagtccacaacagcacacatgaaaagcggcagctcgagttatcactatcaactttcggcgctgcctgttgacataaagtgaatcacgcccacgcgtgatcgtcttgtcacatctaatgaataatgtatctcattgagttcacatatattgcagtgaaaacgacgctatataattgacaatctgaaggcaacctcttcatatcttctttcccactaccacaccacacacgaaaatggaagcctattaattggtaatacgtaatctagaattgagattatgtacaacattcttcactacaattttacattttggcagcaaaccaaatatgatcaaatgcaattttaccttaccaaatatttggtagtgccaaaacttgcttatattttggcattaacaaaatatttgtacggtaacattccaaatatggcctaaaaaataataaaattgtattttaccaatcttggagattttaatcttgtatagttttcaatataaaaagatttgataactattgatatttatataaaaaaatatagagcacagtacaaaatcgccctcccccagggcggcaagggggccgcctgcaaaattccatgccccctcgccgcccatttgcaggcgggcccccgcacagtgcaaaatcgccctcgcggagggcggcaagggggccgcctgcaaatttccatgccccccctcgccgcccatttgcaggcggccccccgcacagtacaaaatcgccctcgcggagggcggcaagggggccgcctgcaaatttcgttgacggccgtcgcccgagagcgaacggccgtctgccacgtcattttcgccgccctctgggagggcgatttttaaaaatcgccctcccagagggcggtaggcgactatttccgtcaattttcaaaatggaaaattatttttgtaaaacttttaataaaaaaaattataaataaaaaaaattcttgctgtggggaaaggagaagaggagagagagggggagaggaaaaggtggtaaagtgataaagttagtactagtaggacccactatagacaacttgcactgtgaaaacaagtagctaatattgttcttagtctaggtgacacgtgaggctcaccaaaatttggtgttgcactgtgaacgcctttacagtacttgcttgacgtgttgttctgaacttcaactatatgatccatgcataacagttgtacagtatggcacagtgccacagtgaacctggagtcctctatgctctgcttctgccttccctttcctcttcgttttatcatctactgcctgtcaaaaaaaaatcaaaccctaagtttgactatgtcgaggtatgagtacagattaccccctccggctaaaaaaaataaatcaaaccgatttttttagacggaggggtaatatgtaatcatacctaatttagagtttgatttattttttttagacagagggggtaatctgtactcatactcgacatagtcaaactattgatttttatttggcaagtttattatatatgttttagaaagagctaatgtccggtatgtatgttgtctttttcgtgcttgagtttctggatgaataattctgagtggagtattatcagaaaaaactaatttgtttatattcatagccagggtaaattttttaatataagaagaaacgatggagtatgtgcaagtgatacaccctgatggttcaaaaaaaaaaaacaccctgatcgattccctctgcttcgagctagtggtgactttttcgaaacaggttggcgcgccgcccacggttgcaccgacccccggcagccagtacgtagcacaggcagtgtaggcacgtaccactgtaccagtgtgtacaactatataaggccagtcacaatggctagtgtcattgcacggctacccaaaatattataccatcttctctcaaatgaaatcttttatgaaacaatccccacagtggaggggtttcactttgacgtttccaagactaagcaaagcatttaattgatacaagttgctgggatcatttgtacccaaaatccggcgcggcgcgggagaatgcagaggtcgcacggcggaggcggacgcaagagatccggtgaatgaaacgaatcggcctcaacgggggtttcactctgttaccgaggacttggaaacgacgctgacgagtttcaccaggatgaaactctttccttctctctcatccccatttcatgcaaataatcattttttattcagtcttacccctattaaatgtgcatgacacaccagtgaaacccccattgtgactggcctaaagaggatgcgacgcttgccggtcccatggctttagtgagaacgtgcacaggcaggcaggcaggatgcacgggttgggggctaatgcacgaatgttcgcgtgtccgggccacacgcacaaatgcgtctaaaacagcccacgttcgtctgccctactgtgaggtgtctgactcggacttcactcggacctgtgcacttctctttttttttttttcaatcaaaattcctcttggaccttcggatgccaaccacagcctccctctgacgagctttgtttgggcaaccagattttcccccgcaccacagctgatatagcgaatgacgactaaccttgtcaatcgctttagtcattgatcactcaagacacgtcagataaggtgatacatgaacacacaatatttgttaatgaattagtcttcctacgttacactgcattgtagtcgccatctgacatatattggatgattaatgaccgaagtgattaagaaggttaatcatcgctccgagcctccagcaacgagcgttgccatcatctaccacgtccagccctaactggttggcgcccttttctcctgccaccaaactcatcccctgccctctcccaatctacaaagttgtcactggcctcaccatcaccaccgccggtcgccactacttcggttatccctctaagcctcgggaacacccccacaagcaaccaaaatttgtttgtgtggagactctctacctagctatccatcccatatctactaattgtgttgctataagctaggattagagatgataaaggtgttagcctataggaaatgcaaaagtacgggatcccatccttgtatctgccactactaggaaaactattttttccagcggatgaaaacggttttcctaagtggaccggccgtccggtccacctgtaagcaaaagcctgcgaagatgcattttcgtctgtctaccaaaatgcatcttcacaggcggacgagcatcccatcccccgttgccgttttcacaggaggacatttagttccgaaaatgatacccgcctagaaaaatggaagggtctcgttttgcgaaaatggttttcctagtagtgtgcttctcgcacgaggtgcgcaccgccgtcgctcctcctcgataacgagccgaggaatagcacaagcgatggtggtgtaggtgaccaggggccataaggaggtcttcttgcgccatggggatggagcggtaagttgatgcaagacctagcggtgggacaatgaaaacgactgacggcaggagctcggtgcaaagggagccacggagactgacgtcagggtctattgggtgggacgacagttggatgtgcacagcctgtgtgccacactggtcgtgcaccacctttccacgggtcgaggattggaggatatgcatgccagtgccatgaacagtgataggcgacagcttgttcaagatcaggtgtcgcagtcttcctctcccgataccaccgccgcccactacccacatgcaccatcaccagcgcgtgccaaaacatacatagagaaggtcaattgagaaggcgaagcatcaggaagaagacaacagcggattccctaactcgtaccaggcattcatttctgctaggtggatgaaggtggctggtatcctggtgatctaaatgagaaacgcccaggggttttccggctagcttcacaaggtggtgggctatacgatctgagtttaaagcctcactccttctaattatttgatattaggtcattccctaatacgtatgtcttttttttcacggcaatcagaactccgcctccttctcatgcacccgatgccttttctcctctcctcctaacccaggtctaaaacatgataaatatcaatcaagaattaagaaatcggatggagtagttatatacaaatcaatccgtaaagtgagaattatcgcgtgatccaattaaagctttcaccgagcaaccagggtgctcggcatgtacacgcacgaaccatacaagcaagtacagagaccacacaaacaaactccattttcttcaccacatgcacatgcgagggtccagccgccggtgacccacccaagtacccaaactctccatttacgggcgatgccgggccaggctgttgctgttccttcccggcaccacgggcgcggcttctgttcacgccccgtccggcacgcgtggccgtgcccgtgcccgggaaaccgcggccatcatccgtgtccctccttttccacctcattgtttgcctcctttcccatgcatgctgctgctcaaactactgtactctgcatgcaaccagggtttcccttattgttattggcgcggttatcacacccccatggtaaggtggttacgtaccgtggtaactgcgcggttaccgtgaaaactgtgtggtaaccgcgagacatatcatggttttaaaaactgaaaatgttaccatgcatagtaaccgcatgataatcgtgcggttttgtaaacccagcatgcaacccatctgaacttgtaggccttaataactcgaatgccattcgttaaaatgtggattctatgtaaagaatcaaagatgatgctaggcacagatcgagattatggttatatgaattactgatgatgcagagatcaaagatgtatcctagtagcttgttatctaataaaagaccatcaagattatgctggtgcgagttagtactaggctttgccggtagaccatggatcactactcattagaagggacccaacacgaacgcatacgcatcacgcatgcagtgcttcaaagagcgagagcgtgcagttctctgatcactccagcggtgcttcttttgacatagaattattaccgctaggacacactccaagcaaggacgcatgtcatgagctgggagaggtccctactcctcgggaagtgtttagatgggactaaaactttttagcccatgtcacatcggatgtttgaacgctaatttagagtattaaacatagactaataaaaaaactaatttcataaatgagagctaatccgcgagacgattttttaagcctaattaatccataattatcaaaagtttactgtagcatcacattgtcaaaatcatggcgtaattagacttaaaagattcgtctcgcgaattagtccaagcttatggaatggattttgtaattagtatatgtttaatactctaaattagtatccaaacatccgatgtgacagagacttggaataagtcctggaaaccaaacagagtcttactcctacatggctaacagatcaatattgtgaacctaagatggtaggacatggacagccgcgtaggccatcgtatgtatttatgcgtggacacagctagtaagtgtatctgtgtataatccaaggacagctttgaggcgcattttgacaactccgtacaaagatcacggatcagcccctgcattgcatgctgttcttcactttcatctgctcaaaatttcaaaaaaaaaaagtttcacctgcgcgtgtatgcatccaatggatacaaacgtacaattgcaatataatccttctaagagcgagagagttgaggagactagcaactcatcgcatgcacgaaaagccaatttgatacatggagcggtggagccatcagccatggatgcggcatgtgtccgagctacatggactaactaaattaaccaatgttggcattattgtccactaattcactcttgcatgttccaaagagagaacctctcataaaggttccgccgaggtgcatgcacttacagaaagtaaatggtgcaatgcacgtaggcattacgtcctaaattctccatctaatggcatcacaacaacaccgagttgcacagaaccctgtcacatgacaggaactcagcaagacgtactcctagtacgtgccattgtgccaatcaccagcgaccgatttgacgcaattattcgggaccgtgcccgatgtatgtagtacgtgcctacgagtagcgcaaccaccggcctcaatttaggccaaatcaaactttatacccagtgaggggatgtgtatgtttttcacctacttcgtactgtatggcttcacaagtttcacatgccatgccttccagtcactccacatgccagcagacagctagctcctacattttgtctcatccacagtaataaaagggttaatttggacttactggtactatttgctgcacctgtttttacccgtgtaggaggcatacaaatatgccttttttgagaccgtaggtgcagaacaagtgcaaatagctgcagaacaagagtagggctgtgtataagattatggtgccattttgagcatgaacagcgggtaacaatcgctagagaaatcgtccacgagttactgccaatgccatgacgctacacgggaaatgcaaggggaacaaatcaacacatttactgctgttgaggaggcaggacaagttttatcttttcccttggcccgtcatgcttgtctcgttggtgctttcacatgcctacttgccttctctaccttttcttccccaccatccatcttttcacttccagctgtaacaacatcgtcaccttaagcatctccatggctccatgaccactggtgttaataagcaatctacccttgcaaaaacactaacactaacctttgcgagaacaaggtgacgaattcaactcctacctgatcagtggacaccgcagaaaatccttggggatgcacacgaccaaagcagcaccagcagtacaactgatcacagtacgactgcaataggataaatgcgcaatgaatagacatgtcgtgagcaaaggtgagcgcataaatgcacgtagcaccggtagacatagtacatttgtaggcagtgatactgatacatacagtactggggagacgaaaggtagaatacgaaattatgagctacgaagacgtcacgatcgctgctcgttggagaaaaagggagagaaaaaacgtaccccagcaagatcaagtcagcaaaagcgaccgagacggcatcatttgcagacaggagtgaccaaacagttgtgcaggccagaacgggggcagcgcctgcctacgctgcacacgtgctgcatcactacccccctccatcgtctcttctttcggaccatcatgtgctgtcccaaaatcctaacagcagtgcgtggatgcttgcctctgcaaatccaacctcattactatctaaaacgtccaaactcatgatcacgatactagtaccacgtttctggaccacagctgggcaaggagccaaggatggttaactggccaccctagacagatcggatgcccgtgaattttaaacaatgtaaggttgttacggtagtggagtaattctgttattcgatgcattctttgagaaatgctgatcatggtaatcagagatcggatgatccaattatgcaagattttcagcaaaactgaggtagtttaatgtaccgactgatgaagagatgctagggaaaaggaaggcagtgaccaggttttccggggcttgtggcatgcagttgtggcaaatcctgagatttgacatgaaatccaagatttctgaagcgcctactcacgctaacagaggaaagctaaatgccactgctgttcggtacactcgaagtcacaaactacagagagatgccgcactagcactacccaagagaaaatatacggaaagcgaggggcgcagaatcaaaagggagaacaggatttacctctgcaggttgtgtcgaacgaagactgactgcctgcctctctcatctttaaacccagcagttaataaaattgccaccgtttccttttccggggcccctgaattgcgcaggtcgccttcagtgacggtgctgcttcttctccctcctccgtccgtcctcaagctctgcccccgtccgtccgtcctctctcttgctttgcttctttccttgcgtggttctttctttctgtcactttgctgccatcttttgctttctcccactgttgatcaaaggaggtttgaacttgagctcagctcaggggcaaggcatcgctctccgtttcttttgctgcgtctttcctggctgcaatggctgggagctttgaggggaggagccctgcagctagaggagtcgagcaggtatgcaacatgaagcgtttttcttttgcatcttcttttaaagcattgtggtatattcatgcttatgccaatgattcttcttttgctctcctacaattccaacaatgcatctttgctaagttggatggatttgctcttcttgtttgtcttcaaggagccaataaacactgcattcttattgagaaagtattagacaccattatttcattttcaggatatagtaagctatatgcacgtcattttttttccaagatgttgagtgagcatgacatttgcttctgtggccgcccaaagttccaaatgcgcttaatataatgtcatttcattttcttgtctgtatccttttggggttcacttataacagaagacatcaaacctgaaaaggacatcttcctccattacgcgatttaattttctggttctttccttcaggcgcttgttgctctgaagaagggtgcacatctcctgaaatgtgggaagagagggaagcccaagttatgcccattcaggctatcttcagtgagtagcttcgttactgtaattatgcttagcagcatgctaaagatcgattttattcattaactttcatggattacgcatgcaacctagtgacgactagagacatgtagcaaaacatatgttcagtgcctatgagatatttatttagttgtgttaatctgaatgttctgaacatttaacatgaatgactccattacaggcttatttacttaatgcacggaactttgatggaagaagtataataactattcagccacttgaattaaacaaataaaaattaagtccgcatgaagctcatgccaagtaaattaactgatgctacttagtttgttttggcttccaagttcttcaccatgttccgttgagcagagccatgaccagaactcttagatgaattccgcccagttatccacttctccttcatctatctgcatatcaagatctcacgatgttcctccgcaacctttcaaagatgttccttgttttcccaccgctgataaacagatgacatgtcacaatgagattaacatttatggccatacatacagctacgtcagtagattactccaaatctagctctctgcactcccaccatccatcctttattctgaaattagcaattcaatttccgtaatgtagagaagattgtaacactatgaacacaacaaggtatgatgtttgaatattaaatattctaaaattaggtctgcaatatctacttcttcccagttcccatggaacgtatccagttcagataagtagattgagtaaactgcacattaacgtcttatctttttaaaacattagaattcaagatgctgtgcctctaaataacattaacatgcttcttttgcaggatgagaaaatgctcatgtggtattccaaagacagggaaaagcgtttgaacttgagctctgtctcaagtgtagttcttggacataagacagtatgtggttttcatttctcaagcacattgctattctttgtccatagtacatcattaaggatagaacacgttcattttctgaggattctagtattttacagacaaaacttttacgtctgcattggccagaaaaggaatcccactcattgtcagtcttctacaagaatggtgaatgttcacttgacttggtatttttactcactaggcctgttgtttagactttgtaaattttatccttcacattattaccttccgtaacatttttctaaatcacatttcgcagatttgcaaagatagggatcaagctgaatgttggtatataggcctaacaaccttactatcagttccatgcagtccagtacttttgattgactcaacaagtagccgtcggataaacagctgtacaaatagccctcctagctatattcagcaaaggagtaggctatttgctgtgcatgacacaagaaagtttaaacaggttcattctataacttgtgcatgctgtgatttctatgtgataattttgcaacttaccacaactacaagtgtgttttgatttttcctaagttatgctaagtaacacgatttgatccataggctcaggaaattgtaaatatgtaatatttcaaatgatggtcatgctagttgtgttgaaatattattcatttcaactaattagttcttatccaaatataacaataatgatacagctaaatgacaaccacattgacagacttttgcataaatgataagcgacacctctttttttttcttgcaaatcatgaaactaagtagagcgatacgacctacgattggtcataagttgccctatgttctcagttacaaagtgtgtttcacctttttagttgaaatgacatgtttttctacatgatttctccatcaaggtacactcaatatatggcagtcctaggctgatgcagaaaaatgttttgcaaagcaatctggatttctcagaaccattcttctctccaaggcagaggacatggtcagacctagactactacatggaaaaggtcactcccgatgtggttaatagggtaaaacacagttgcagggatataaaagttgctgacaaacttaacgagcaaataattacccaactgcctaaacaaaaatcatctgaggggttacatgttgcatatggagcaacttctctgaaggacatctttgtctggggagaagttcctggcaatgttttagatcatggagatgtatcaaaagccaatgtttcacttccaaggttattaaacacgacacatattattgatgtgcagagcgttgcttgtggagagaaacacgcagcgatagttactaagcagggagaggtcttctcctggggtgtggataatggtgggagattggggcacaaagtgagtgtcagtgtatcagatcctaaaattatcgagtctcttgcctctacacgagtgaaggctattgcatttggagcaaagcacacctgtgcagtttcaatttcaggagaactttatgaatggggtgaagggactcactgcttgggtttgtggggtgatcagtatcaaagaagccaatggttcccacataaattgtttggtcctttggatggcatctcaatcttgaagattgcatgtggtcattggcacacggctatcatatcctctgctggccagctcttcgcatatggagatggaacctttggtgttcttggacatggtgacacgctgaccgttgctcggcccaaacaagtggagtccctgaaaggggtacgagccaaggccattgcgtgtggaccatggcacacagctgctattgtagaaagaatgggcactgtcaagagcaatgctcctagtgggaagctgttcacatggggtgatgcggatagagggaagctgggtcatgctgacaaaaagatgaaacttgtaccaacttgtgttgagccactcaatgattttgattttgctcaggtatcctgtgcaaaagcacaaaccattgtgcttacaataaccggtgttgtttttaccattggaagcaaggaacacggacgattagggaaccctctgtctgaggacacatctatttgtttaattgaggggccacttaagacagagtttgtcagagagatatcatcaggctcttcacatatagcagttttgacaatgaatggaaaggtgtttacatggggcaaaggaacagaagggcaacttggtttaggtgactatgttgacaggagctacccgactctggtcgaggccttggaagacaagcaggtgcatagtatagcttgtggtttcaacttcactatggcaatttgtttacataggccactctcaagcaaggaccaatctgtgtgcagcaactgccagctaacatttggctttacgaggaagaagcacaactgttacaactgtggttccatgttctgcaattcctgcagcaataacaaggtttccagagcagctcttgcaccagataggagcaaaaggtaccgtgtttgtgatgcatgtttcagtcaaatgcagaaagttgaggagcatagaaaattagatccacaacagaagatccaaaaggatgaggtatgtccaatagaaataagatcatatacgccaaaattggcgcgcatattcaaggaagcaaatgcaattatggagaaaatggcatcagcacaaagcccccatcagagaagtcagaatttggctgtgccagatcatgtgaggacattaagatggggcctagtagagtgccccagtcaattcagatgtgtgagagagagcattccttattgttcaacattgaataaacagacagtctctggttctattgtacgggtaatgaatgagacaatggcacctaaacctgccagctctttgctcaaatctgctaatgattcaaaagcggaattagacttgatggaaaatatattattggaagaagtgaaacagcttcaagagcaggtaactgacataccatattctctgtaataaacatgtttcgtggatctgtttaaattatttgttttcactgaatgtttgttctggtatgcaacgtataatttagtgataaagatggaaattatgttttatataagcaggtaactactcttgcaaaacagtgccgccaaaggagcctgaaagttcagctgtacaaacgaaaagtcgaggagacttggttaattgccaaggatgaggctgcgaagtgcaaagctgctaaagacataattaaggttttgatcgatcaggtataaaaccgatgacctatctccatttgacagatttaccggcttttttttctaaataagttgtgtggggtgcccaattgtgcagcatgattttttatcaaagaaccttttggctggtgagaaattagacaactccagaatcatgcctagccacatcgccagtgcaaaatcactaaaagcagaattaccagacccacctgacaaaaatgtattcaccagcgaatttcaacagtcgaagagcaacagagatcaccacaacagcaggcaggtggatagggaatgcacacaaccttcaattgcttccatggcgaattactcggttacgcatcagaattgcagaagaacttccaacggcagcaccagatgcaccgagggaacagatgccaccactgctcctaccgattccaacggtgtgatcgagcagatcgagcgcggggtttacgcgacagtggttacatcccccggtgggaagaagtgcatcaagcgcatccggttcaggtgagatcccccaagaacctagattataatcaatcagttgtcaacgatggcatcatgtcttacctttgcaataactaactctttcaatctcgcagtcggaagcactttggagaggatcaggcgcagaaatggtgggaagccaatgagagcatgatttttggaaaatacagcagcatggaacaaacggtggggtaatctcttctccaactccaagcaacccaaatgaagaacataaaggaatagtcagctctgccgccaaattgttaataggacacagtagaagtagatagaaatatgctactgctcgatgaactggcgtggataggatggggatcatggagaaaaatcagaaaaaggggttgagactttgagagaccagctctgaacagtaaactgcatctggattgtgcggctgtggcttgcggaatttggagtaggatctaggtttaacctctccacccgtttgaattggattaggaattgacgcctctttggactgatttcgattacgcgagggttagtatgtagcgtggacgcgttggccttccctgatcggagagattaaaagcaaaggacagaggagacgagacgtaccggagggtccagagcggcgccgtgacctgatcggcgcagacgcctgcgcgcctccctccgcctccgtttcctcctcctcctccccgtttcggctactcgcctcgtcgttgccgacggtggcgtgcccacaccacctcaccgccgccgcgcttcgcaaaggcggattccgatatcatgttgcggattttggtcgatccggtgttgcggcctgcacgtatcttaaagcgctattagaataaatcctagcctttggcttttctgtttggaaccatattttcgtcctcctaacttccattttgcgcttgccactagctcatcattatctgagttgttatctttagagcaagtatagcaggaaatacctctaaatcatttataatcaatttatttaatatgtaatacatatataattactacatctgtcccaaaatataagcatttttagctataaatctggataaacagttgtccagattcacagcaaaaaatctatctatctattatattattaaaacagctttgaaaggagtcaccacattcgctgtgggggctagaaattcccacattaatcggagaaaaagaaaaaaaaagaaaagaagagtccaagtagaagcacaatctaaaaatagctgaaattcggatttaaaaataagcaatattgaaagaagtttccatataagaacccaatacgagattaatcaaaattcgaaataaaaataaaataaaatctaaaattagaaaaggaaaggagagtccaagtagaaatacaatttaaaaatagctgaaattcagaattaaaaataagcaatattggaagaagtttccatataagaacccaatacgatattaattaaaatttgaaataaaaataaaataaaatctaaaattagaaaaggaaaagagagtccaattaggaatacaatttaaaaatagctgaaattcggaattaaaaataagtaatattaaaagaagattccatataagaacccaatacgagattaattaaaattcagaataaaaataaaaataaatctgaaattagcaaaagaaaataaagaagagttcaagtaggattacaatttaaaattagctgaaattcggaattaaaaagaagcaatatttaaagaaaaaccatataagaacccaacacgagattaattaaaatttcaaataaaattataataatatccaaaaatagaaaaattaaaacagagttcaagtaggaatacaactttgaaacaactaaaattcaaaataaaaaataaaaacattaaaagaacacaatacgttattaactaatttttttagaaaaaaataaattctgaaattagaaaaaaaatattttaattaggaataaaatttataaacaactaaaatttgtgataaaaataaagactattgaaagaaaagaccatctaaaacacatgacgagataaattaagtaacatgcctataaagtagtagagttggtggcggttaatactgtcgacgggtgatacccgtagaccggatatagagggtattggggtacgttggtacaaggatctacgtagtacgacatcaagcaaacaaaagacaagaattatactggttcaggccccttgacaggtaatagccctaatccagttgatgtgggattatatggtaaaaaacataggttacaaagagaacaagggaacttgtcggatccggcgagattgtagtcgagttgattcgactagctctcgatgacttggctccttgcaagcttcggcttcgtaggctgtggaggttgtgttgggtctaagattcgatcctaaaccctccccgggagccccttttatatcgcagatgtggaggtctcctcatagaactcggaggtatcagaccctatacgatacgccaacgacccagttctgcccgagtaggattcttcccatctgtagattccgtgaaaagtttccttaggatatacaggaaatatccgcatgcgcgtgggtatgccatatcgatatgtaacgtatatcgaagggtaaagggtatgcctaacccgtaaccctgacagtagtccccgacttctgcttaaaatgaactcgtgcaaccatttgcgacttcgggtgtcgagactgttgtcattcccggtgcgaggaccgtggagatagaccgtagtcgagcacgccatttgaagcccaacggtcacgagcgaattttaaactgaagtccaaaaaaccgccgcgcgtaacgggaccagaaatttccggtgggcatctctctctgttccctggaattcgcaccgtcggtagtgcgcctatttaaaggaattttgggagtccattttgaagtccgccaaacctgttatacacgcaccacctccaagaactctttgccttctcagccgccgcaagaaaccctagttcgtcaacctaggctcgttttccggcgaccttcgatcagcaatggacctcggcaaatcggcttccaccagtgcaacgttgaagaaactccaggaggatggcactcttcctggctgtggaaccatggagagggaagcatgaggtactaatcctcagcccatcttgggtcgcatggttgtgatcgaagattatgttctctgcggttttctccctccaccttccgaatttcttctcctggttttgaatttctatggtctttctcttctccatttgaaccccaattccatcgccttcctcagcatctttgtgcatctttgcgaggcctacattggggtagagcctttccttgatctttttcgcttttactacgaactgtgttggatggaatccaacagggtatctggttgcgtcgggttccgacttcgggatggcctgaagtcgcgttacattcccttccagtgccttcttctcgcagcaagtggaggaataggtggttttatcttgagatcaagaactcgaaccctgtctttgtggttcccgaagatcaaccggataagattccgtcttggaccgcaaagccccccttgaccccctctcttcagtcgtttatcgacatcatcgacgatctccgagtacggggtttgtcgggatatgaagtcgttgcagacttcgttggtaggtggatccagccgcttcaggctcgggcccatccagcttataactattccgggtcagaggacgcgacccgggtttctcctcggggtatctttctcgcatttatcttgacatacttgtgtttgcattcctcttgacttatcgaaggttggttctcgattaacaggtctgagcggcaaaaccgtggagcgccgcgtcggccaagtgatgatcagtggcccgaccacggtgagtgacatccctgtgcccctttgtgaaaagggggcggcggaacgtgataaagccatcaacgtaagtatattcgataaacatcctgcattctcctttcgaaatcactttatgacttgattgagcgtaggctcttcctttgactgatgtcatcggaccgctcgcggaccatcaggtggcgtcatctctaaaagtgaaggtcgtcaaggaggtgtctgatgctgccaccactagcggtggcaatgttccgacaaagccgaggaaattctcgtctgtaagcggacatcgtcgcaaggcgtcgaccccctcggtaatttattttgtcgttaaatcatgcagcaagaaggatttttccttactttgcgttgattgtctttcaggcctcggacgcgtctcccccacctccacgacgacaacgcattgtgacgatcggcgagaagtaagtagatgaattcttgaatccccgcgcttcttattcgattattgtctgactcatggtcgtcctgtagggaggcgcggacaaaggctgcacgagccaagtctagaggagcttccagtgcgtcgcccgtcgtggcctcaacggatgtcgtgcccgtagccgagagccgggaggcgatgcctagtggcccagtcagcgaccccgcggtaggtcgtgatctgccagctgcagtcctcacctgggaggagctccaagtcgagatggggcgcctcctcgaagccggtgctcgcggcatcgaccgcgagattgcggaggcgaggtcggaagcggcgacggcgaacgcgcgtgctgacagactggtgtgcgagttggttgaagcccgtgaagacctcacgaagatgagggagttggcagccggcaacgagcgacaacggaaggggctcgaggaccgaatgtcggaactcgggaacaacctatctgagatccggggctcgttgagggtcacctacactagccttcaccagctcgtcggggaatgcggcgtcacgtccacgatcccggtgaatcccgatgagttttcgctgacctcctctctcgcagaattggtgacggcgatgggggaaatcccctccaagcatgcggctaggattgcggaggagacgtcaaacggaatctacaccggggcgtgtcatgtcctcgcgtgtgtaaggctgtcgcgtcttgaactcgatctgcgtgagatcttggaccagggggcggccagcgacacgcgtaaggaggtgatggaagaagtcggtgatctgggggagtctgttctccccctttttgaagagtaggacttcttgtatttcctagataatgtgtaaaactcgaactctgaccgccttcgtgcgtgcgattactatcccggcttactttggtatgctgacctcgggaacttttgtcctctgtagagatactgatcacgaggatgtccagcagcgcgggcagctcgagtcactggcagtaattccggtactcgagtttgaaccacacgtctcgcctgaccatgtggatcaaccccttgatatagagggaaggacggcgacgacttcctcaggttagtagtcccttcaccccttaatgcccacctgactaggtcagccatatcccgaaagagatgtatagcttgacttagtggttatcacgtttagcagatctcgagggtgtccttgctagccaagatcgttgtatccaatactggaagacgaagtttgaagtggcagagctcgagagaaccatgctggccatgaagaaagagcagactgtggaaacgctccgaggtcgtgaggtgtggtttaactcgtacttgaagagttgctgcacatccatggccagagtatgcagggagcttcgagtagtccgcggagatcccgaggagtcggcggccgggtacatctcgtggcttaatggggcctgtgcccaactcgatggaatcggaaagcgtatcgacgaggccttgaagcaggagtgtcatcgatcgagccgatatgctggggggcacgtgttggcttgcctacgagatcatcgcccgcgcctggacctcgaatatcttcgtgagggttttgctcgttctcgaaggactccggcggagatagaccatctggcaaggtcaatgtcgtcgttggccgagaagatcttctagtctatggactggcgttggccttcttggtagtactcgtaccctatgacaaatatcttaggaaaagatgtaatgtagcgaaagatttgtgaaaaaactgtaaggagtattttgtgaataaagaaatctatctttgacaaatgtctcttactctggatgtcatgtgtaagagtgcgttctcagttaacgactttagtcagccgtttgagtcgtacactctccctagcccccagccttgtcgtcggaggaattttctcggaggataaggctcttggacctttgacctgccttggttgaataagctttgatcctagcccccagccgtgaagttggaaagttaatttccgatttcacggcttggttaatacgcacggcgagaactcttacacgaccagatcttatatggtctttcgtctctacaggatctgacaaggccttatcggctctgggcgtccccagccgaagatcccttaggttcctcagaggccttgtcgagacggcgtaaagggacataaggacaggtttcaacactaggtgtcatcagagtgagggatcatcgggggaaacacgttgattgtaatatgggcctagaaatagcctttattaatactgtaagggtgcttacaggtatggatggtattgactcatacatagaatttacgtagttggtcaatgttctaagaatttgctaattcacgaccgtcgccgtctacgattttgaatgcgcctggctgcaagacttgtgtgatcgtgtaaggtccttcccatttaggtgagagtttgtttcgccctgcttggctttgaactcgtcggaggacatagtcgccgatcgaaagtatgcgtgcacggatgtgcttcttgtgataacggcggagggtctgttgatagctggctgctcggacggcaactcgttcccgatgctcctcgagaagatttacatcgatatctctctactcctcctggttcttgtcggagtacttctgtactcgtgtactctgatgttgtagctcgcctgggagcatggtctcagagccgtacacgaggaagaagggtgtttccttattagacgttgtcggtgtggtgcgtacggcccatagtactgatgggagttcttcaacccaccttttgtcgtgtgacatgagcctgtcgtagacgcgggttttcattccttgtaatactatgccgtttgccctctcgacttgtccattgctttgagggtgagagaccgaggcgaagcatattttgacccccaacccgatgcagtagtcctggaaatcggcgctgatgaactaggagccgttgtcagttatgatgcggtgtggttgtccgtatctgcaaaatatccctttgatgaatttgatggcgttgtcggccttgatttcccccgtgggtactgcttcgatccatttggtgaatttgtcgatcgccacgaataggaatctgtagccgccctgtcctcgtgggaatggcccaagtatatctagcccccagcacgagaatggccaagtcagagggatagtctggagcgcttgcgcgggtagctttgtgtgtttactgtggaattgacaggcttcacatcgctggaccatgtcgcatgcatctttaagggcggttggccaaaaaaagccttgtcgaaaagctttgccgaccaatgtccgaccggcggcgtgtgacccacatatgccttcatgtatgtcgaggaggaggtgtctgctgtcgtcggtcgagacgcatttgagaagtaccccgtttggcgctttcttatatagatcattgccgaccgtacagtagatctttgctttacgggttattttctcggcctctgtatcgtcctcgggcaactcctcgctgctgatgaatttgattagtgggatgcgccagtcgtctgtggtttcgatgtcggcaatggcgcgttctgcctcggtgacctccgagctaatgtcgggggtgttcgggctgactttgccgctaacctctttcaccgatggcttcgtcaggatgtcgagaaaagtgccgggctcgagcgattctcgtctggacgcacgtcatgctaggtcgtctggctcgacgttgtccttgtggtagacgtgtcggacctcgatcccatcgaactttttctctagtttcctgacttctgcgtgatacttggataactcggagttagagcatttataatctttgtgtacctggttcgcgactagttcggagtcccctttgacgattagtcgcttggccccaagtgtagctgcagctcgtatcccggcgagtagtccttcgtattctgcagtgttattggttgccctgaagttgaggtggattgcgtgcttgaattgatctccggagggagacgtcaagataaatcatgcccctgctccttggctgttgagtgcgccatcgaacgccattgtccatgtttcattgtcgccttggttgtctaatttgttatctggcatagtccaatcggcaacgaagtcggcgagtacctgggacttgatggctgttcgtggcacaaagtggacatcaaactggctcagctcgactacccatttcgcaatgcggccgacaacgtctttgtttctcacaacttcaccaagagggaaagaggagacaactgtgactctgtgggcttgaaaatagtggtgtagcttccttgatgtcatgatgacagcgtaaagcaacttttggatctgtgggtatcttgtctttgcgtcgtggagagcttcactgacgtaataaactagtcgctgtactttctctctctcgacaacaatgacagtgctaacggagtgtggcgtggcggcaatatagaggaataattcttcattaggttggggagcaacaagtacaggggggtttgataggtagcacttgagtgcaatgaatgcctcttcggcttcctatgtccatacaaatttgtcttgtttcttcaacagagcgaagaaaggttgtcctcgttctcccatcctagcgacgaatctacttagtgctgccatgcatccggttagtttttgtacctccttgagtcttgtaggcgacttcatgttctcgattgccttgatcttctcggggtttgcttctattcctctgccagagacaaggaatccgagcagcttgcccgacggtactccgaacgtgcacttctcaggattgagcatgaggcgatatcgtcggaggttgtcgaacgtttcccgcagatcgtcaatcaatgagtcgcctgtcttggttttgacaacgatgtcgtcgacgtaagcctcgacattgttgccaagctggttgctaagtgcgccctggaccgtgcgctggaaagtattcccagctgttatcagtccgaatggcatcttaacatagcaaaataccccaaacggcgtgatgaatgctgtcttctcttcgtcctcttttgccatgctgatttggtggtagccagagtaagcgtcgaggaagctcaataactcgcaaccggctgttgaatctaccagttggtctattcgaggaagtggaaagtgatccttggggcacgccttgttgaggtcggtgaagtcgacacacatcctccattttccgttggccttccgcaccatgactggattggctagccactctggatgaagtacttctctaataatgccagctttgagaagtttgtcgagctcttctcgtatggcttgttttcggtctggtgcaaatctccgcagtctttgctttactggcttggcatcgggtcgcaccatgagtttgtgctcaatcaccttcctggggacccccggcatatcggacggctgccaagcgaacacgtcggcattgtcgcggaggaaggtgatgagcgcgagtttctatttctcgtttagtgttgccccgatcttgacggtcttgtcggggttggaactggagagtggaacaatcttgatggcgccgtctggtttcggcgtcttatttgtcttggtcactttcttgggtggctcagtcgtggcgggtgggctgggcgtttgctcgaccatgtcgaggctccgcttgtcgcattgcaccgccagctttgcgttcccctaaatagtgattgttccctttggtcccggcatcttaagcacttgatatgcgtagtgagatgcggccatgaacttcgcaagtgcagttctcccgatgatggcgttgtaagctgtatcgaattcagcaacatcaaaggtgatctgttctgttcggaagttgttggcttggccgaaagtcacgggaaatgtaatcttgcccaaaggtctggacgatgattggggagtaattccgtggaagggttgatcagttggtgtcaactcgttttgcggaattcccatcgcgtccaaagtgctggcaaaaagaagattgattgagctgccaccgtcaatgagaactcgcgctaccttgatgttccgaatagtgggttcgaccatgatcggatatcatcctgggataacggcggtcttggggtggtcttcttccgagaactctatcttctgctcagaccacttcatcttgggggcagccccctgccatgtcgagcagacttcacgttccactttcttgtattctcgcttagaggagtacgttgtggaaccgccgaagatgtgtgagacgtggaggttggagtctagatacgctgagtccggttcgtgaggagccgtctcttcgttcgtctcaacaacgcgtactcgcttgcctttttcaaatgccatgtgcttctcgagcgactttttgaaaacaaggcaatcttccagagaatgtctgtccgtcttgtgtatggggcaccatgatttctttgtgtcgctgctttgtgggtctgggtgtttgggagggtttgcgtattctgctgcgaggacttccgcttgagctttcattttcccgtttttgcgatttttcttcttgcttgactcagatgtgtccgtggctggtttcttctctcccccggtcttcggcctatcgttcttgcgtcttagcacaacattagcgtgggcacatcgctcaacgatctcgaataatctccgagtgattgtgatgcgtcttgtcgccaactcctgggtagtgtagcgatctctgacaccggatttgaaggcgcgaattacaaaagcgtcggtgatttcaggaattgtgtttctgcactcattgaaacgtcaaacatattccctcaatgattcacccgagttctgtgtcaacgcgtgtaggtcgtcttcaatcgcgtggcgcttgtatgttccttggaaattggcgatgaattgttgccacaggtctgcccacaaagagattgagtagggaggaagatgcatcagccatgaacgtgcagaacccttcaacgcggttggtaaatagttcgctatcgcgttgtcgtctgctccggcagcatagagtactgtggagtagacttgaaggaactcctctgggtcggtgctcccatcatacttttctattgctccgggtcggaatctctcagaccatcagacatcacgtagggaacgaccgaaagccctacacccagcgttggggcggtgggttgttggcgatcgtgtgtccttcgtggatatctgtctgacgatgaggaggacgcggatgatgacgatgacgatgggtcacttggttccggcgtacgattacgaggatgacggcctggatctcgagaatcctgtcgtcgtcttccactgttgtctcggcgccgatctccatcgtcgtcgtcgatacggtggcggccatgaccagtattgtctggcacccgtcgttcgcgatcgttgtgatcgtggtggttgtcgtggtcccggtcctcgtttgagcagtctcctcgatttccgttatcatggcgccgtgaagagacatgacgtcaagagcgattcacgttgtctcgtgtgcgtcgtgcttcccggcggccgttgatttgatctcgaagatcgccagtgccgcgaggtgaaggggtagctcgttgaggtgattccctccgttccggatcttcactattggcctcgccagttggtggctgctcctggtgtgctgcggtagcggcttcttcaaacgcgttgctgaggttagtcaccgattcccatagtcgttctatccaacgctcgaggtcaacgttcagaacgggatcgtaaggagtttccctcagtatcgcttgaacgggcctgatgtgctgggcttgagtagtcgattgtttccccgcttctgcgttggcgtgcgctgacgtgccaacatcatcgatagccaatacctcccgcggcgtgctcgttgtcgatgacccatagtcctcgaggagatgtaagaccgatggttcgtgaggatcgatatcgattactccaacgaatcgatctgaagttggagtcactccttgttccttgtcattatccctgatggggacatatgacttaggagactgagctttcatggcgccgagaaagactttgcagctcgagaggtcctgattctttgtcttgtgaataggacaatagacatcccgagttggagaagtacgctgaattccacgttctttgcaggcgcgaatttcagcacggacgttgaggaaaacccagcaatcttgcaaggtgtgtttcttggttttgtggataggacaccaagaccttgtggcttcggaagtcatctttgtcggctcgtggttcatgtcggaaggacaaggtttggccgtatcagaatccctcttgagcttggatgtcgtcgatattccgttctccgtctcgacgagaggattttttgacatggaatcgccttggttcgtagccactgcgttctcgtctccggtcattggaggaccggttgagatcggtgtcgtggtgtaaaccgggaagacgatttcgccgacttgagtccataccagcattgttgaagcagggagtacttggctgaggctggtgctgacgttgttgtcgacgaagctggatgacatagtagtagaaccttaagtaccaaggccccctacctagcgcgccactgtcgacgggtgatacccgtagactggatatagagggtattggggtacgttgatacaaggatctacgtagtatgacatcaagcaaacaaaagacaagaattatactggttcaggccccttgacaggtaatagccctaatccagttgatgtgggattatatggtaaaaaacacaggttacaaagagaacaagggaacttgtcggatccggcgagattgtagtcgagttgattcgactagctctcgatgacttggctcctcgcaagctccggcttcgtaggctgtggaggttgtgttgggtctgagattcgatcctaaaccctccccggggggccccttttatatcgcagatgtggaggtctcctcatagaactcggaggtatcagaccctatacgatacgccaacgacccagttctgcccgagtaggattcttcccatctgtagattccgtgaaaagtttccttaggatatacaggaaatatccgcatgcgcgtgggtatgccatatcgatatgtaacgtatatcgaagggtaaatgtcacgaccggaaataacccaacgggcgttccttacgtgcgtgtattattccttgtcccaggaggcaaggtacaccaaaagttgatacaatacagagtttaacaagcggaagtgtaaatagataatttattacatgggcggcgaaggcccagcacacaggaagacaaacgaaaaaaacagcggaagactagggcgacgaccacaggcgcttgacggcaggcacgagctagacaccaaagccttcatcttccaggaactcctcttctgggtttgggaaaaattgagcaagactgagtacaaccaccgtactcaacaagacacacccacaagtgcagaataaatgcaagggagtacaagggagttataacatagggggttagggtttgcagtaaacagcattaaaagacacttagttgctcaaagctattttgtaaatacgatcctagagctatgcaatattattaatcaaggccgtgaacccacacgaacctgccttaacccaagacctacgatgattcagaccgaactggcaacccgaccctgggtcccagctcgtcccaagccaacccaggccaaccattccacattttagttgttaagcaggttttaagaattaaaacactaacttgggtacattgctaggcttgcctataaccgagggcgcggctattcgaataggttatactctaatcagaggtgtacatctttacccacaagacacatcttcctcacgtgtaaccacgtgccacataccaccacggtatacggacggaagacgtgacatagtttccaacccatcctagccatagacaagagtaccgacccaaccccacctacggccggaacctctgggacaggtaggcaggactgagcccctagcagcaggacaccagccctgtgccatgacatctcgactaccgggccgcagctcgtgtagccttcatttgccctagagatgtccatcgacccctgacttcgtccatctccatccgtgtacttttgtttataaccagactgagccacaaactaagccttacccactagacatgtggaagtacggtagtgctttgcaacataggcccgaagaccggtccttatgtggccgaggtgctacaatcaaaaccatgcaccccgagcccagcctaaaaccattttgaggattttgaatagagggggaggtgtgaatccaattccacaataatccaaccattccatagtgtctaggtgatatgaacattcccaaagtctagagttgtaaaaccacctaatgttgcttaattaagcagcgaagcatctacctaaattcatactagtggtaccatgcatagggtacctactagttgggggttttgtttagtctagggtgaacaaggtaataataacaatagcaataataattaggtcataacaaaggtaaataggcatggctaaataaaacagtgataacgcgggaatttaaataaagcgataatgcattaatttaaatcaaaataattttataaactgggattcaatatgttcaaggatgatgtgacttgccttgatcactttcccaaacgtcggcttcaaccttcacgaagagcggatcttccgaagctgcagcgtctacacgaccaatggaaaggaaaaaggcttttactctaataaactccatataacaagcaggaacaaagcacaaaaatgggttcttgacttcttaaggaaaaattagagacttgaacggtccaattccgagttcaaatggccaagttatggccatttgaagtttatatgctctttaagtgaatatttgcgaatttcttcatttaaattttaatttaaaaatggtttattgcgtcagccgaggggagagggcgcgcggaccgggtccatgggagtggggcccacgcggcagcctcacggtccacggtggaccgggcgctcccgggctcacaccggcctgcgccgtgggccccacgcgtcagccgcacccgagggcgtaggcggctgacggccgggccccacgcggcggccactcggcgcgcccgaaggcggccatgccggcgcggtcggcgggaggcggcacctgcgcccctatggtcgccggcggcggccataggcacggcggagcagcggccgagagaggggaagggaagggggaaaagaggcggcggtccacggctcaccctaggtcgacggcgacgacgaaaaaggcggccggagcggaggaaggcggcggcgcggcttgggtcgacggggacggcggcgctccggcggtcggcgagcctgacgagggggtggacggggacggtgacggtgcggcgaagccggagaaggcgacgccgaggcgggagacggtcccggcgagcggagagggccggccggaggtcgtctgcgacggaggagagagagggcgatggcgcgagctcgattccggcagggagacggtgcggcaaggggcagaaacaggcgagggaggcgcggggagggtttaaatagggttggaagggggagagggcggccgggagaggaaggaaaccggccgggaggtccggccgccatcaatggcgccggcgagatttgcgggagcaaatccgcccgtttgtatgcgagagagagagagggaaaaatggggggaaagggggaggggatcacggggaatatttccccccactttattgcacgcgggaacggccggaggcggcgggattcgcggcggcggcggcgctaggcgcgggcgaggcggcgggagcggcgggaggaaggagatgacgggtgggccccacccgtcagcgagggtggcaggcggacccgcccgtcagcagcgcacgcggggaggggccgtgtgggccgcgagggaagaggagagagggggagggaagtgggccgagccggcccaagagagggaagggggatttttagggtttttttttataaaacctttttaactttgtttatttcttaacaattattatttgtgctatgaaaattccactaaaatttatttacatattttaggcttttaggaaatatacaaaaatcctctaagccttatttgacttttactttgcacattttaatttttggaggctttcacacggattttaattattctaggcataatttagagaatgtattttagggtcgttttgggacgtgacagtaaagggtaagcctaacccgtaaccctaacaaatacggcatataaaaattgttaataaaacaccaaatagaatcctaatgacgattaaaaggagggacgtcaagcaggccataaagcaaacaagtaaagcggttgccgggacttctagaaagtataaagaaaaaaaatccacattgataatcattttcgatttttaaaatctcaatgacaataaaaaggagaagcagcgagcggggtgtataagagtatagttgcagagcctccgacggttgacgggacttctagaaaataaaaaatgaattgcaacgatagttatgttcgatttttaaaattacaatggcaataaagagtaggcggcggacgggctgcagaggggcatagtggcatcgtttgatgagacttttaaaaattataaaaaatgaaactacaagtctaatttttaaaggttcggaacttctaaaaagtaaaaaataccaatgataatcatgttcaattttgaaatctcaatgacaataaagaagggaggcatcgggcgagccgtagaggagtacaatggcaaaaccgctgatggtttggcgggacttctggaaagtaaaaatgaacccaaactataattatgttcgatttttaaaatctcaatgacaataaaaagaagagatagtggacgagatgtatatgagtataacgacaacgtttgacgggacatctagaaattataaaaacgaaacccaacgtgacaataaactctaaaaactataaaatccaatttttaaaggtccaagaatgaatagaaaaagtgatagatcgagcaaacaaataaagaatgagatgacataaggggtagcaactggtgtgatttttaaaactatataattagaaacatgaggatgaggatgataaggtttggtctttcaaagtgttaacaatgagatagctatttaataaatttcaaggaaatcatacttaaaaaaatatatgatttttttgctagccgcgcaattgcgcgggccacccagctatttatattattaaaacagctttgaaaggaggcaccacgttcgctctgggggctaaaaattttcacattaatcggagaaaaagaaaataaaataaaatgagagtccaagtagaagtacaatctaaaaataattgaaattcggaattaaaaataagcaatattgaaaatagtttctatataagaccccaatacgagattaatcaaaattcgaaatgaaataaaacaaaatccaaaattagaaaagaaaaggagagtccaagtagaaatacaatttaaaaatagctgaaatttggaattaaaaataagcaatattgaaagaagtttccatataagaacccaatacgagggattaatcaaaattccaaataaaaataaaataaaatccaaaattagaaaagaaaaggatagtccaagtcggaatacaattttaaaatagctaaaattcggaattaaaaatagggaatattaaaagaagagtccatataagaacacaatgcgagattaattaaaattgggagtaaaaataaaaataaaatcctaaattagcaaaaaaaaagaatagttcaaatcggagtacaatttaaaattagctgaaattcggaattaaaaaaaagcaatattgagagaagactccatataagaacccaatacgtgattaattaaaattcagaattaaaaaaataatatccaaaattagaaaaattaaaagaaattcccacattaatcgaagaaaaagaaaaaaaaagaaaaggagagtccaagtataagtacaatttaaaaatagctgaaatttggaattaaaaataagcaatattgaaagaggtttccatataagaacccaatacgagattaatcaaaattcgaaataaaaataaaagaaaaagaaaaaaaagaagagtccaagtagaagtacaatttaaaaatagctaaaattcggaattaaaaataagcaatattgaataattttccatataagaacccaatacgagattaatcaaaatttgaaataaaaataaaataaaatctaaaattagaaaaggaaaggagagtccaaatagaaatacaatttaaaaatagctgaaattcggaattaaaaataaggaatattgaaataagtttccatataagaacctaataaggaattaatcaaaattcaaaacaaaaataaaataaaatccaaaattaaaaaagaaaatgagagtccaagtagaaatacaatttaaaaatagttgaaattcggaattaaaaataaggaataataaaagaagagtccatataagaacccaatacgagattaactaaaattcgaaataaaaataaataaatctgaaattagcaaaagaaaataaaagaagagttcatgtaggaataaaatttaaaatttgctgaaattcgaaattaaaaatatgcaatattgaaagaagaatccatataagaacctaatacgatattaattaaaattgagaataaaaataaaataatacctaaaattagaaaaattaaaagaaagttcatgtagaaatacaattttaaaacaactgaaattgaaaataaaaaacaaaaacattcaaagaatacaatatgatattaactaatttttttaaaaaaattctgaaatttaaaaaagaaaaataagatatcaattaggaatacaatttataaataactaaaatttgtgataaaataaagattattgaaagaaaagaccatctaaaacacatgacaaaagttcatgtaggaatacaattttaaaacaactgaaattgaaaataaaaaataaaaacattcaaagaatacaatatgatattaactaaaatttttttaaaaaaattctgaaattaaaaaaagaaaaataagatatcaattaggaatacaatttttaaataactaaaatttgtgataaaataaagattattgaaagaaaagaccatctaaaacatatgacgagataaattaagtaacatgcctataaaggagtagagtggtggcggttgatacgagatataaaaattgttaataaaacaccaaatagaatcctaatgacaattaaaaggagggacgttaggcaggccgtgaagcaaattagtaatgcggttgccgggaattctagaaagtaaaaaaaaaactcattgataatcatattcaatttttaaaatctcaatgacaataaaaaggagaagcagcgggggtgtataagagtatagttgcagagccgccgaaggttgacgggacttctagaaaataaaaaaatgaattccaacaatagttatgttcgatttttagaatcataataacaataaagagttggcggcggacgggctatagaggggcatagtggcatcgtttgatgggacttctaaaagttataaaaagtgaaactacaagtccatttttaaaggtttggaacttctaaaaaaataaaaaaaaaacaatgataataatgtttgattttaaaatctcaatgacaataaagaagggaggcagcgggcgagccgtagaggagtacaatggcaaagctgctgacggtttggctggacttctagaaagtaaaaaatgaacccaaacgataattatgttcgatttttaaaatctcaatgacaataaagagaagagacagtggacgggccgtagaggagtataatggcaacgtttgacgggacatttagaaattataaaaatgaaatccaacttgacaataaactctaaaaactataaaatccaatttttaaaggttccaaaaagaatgaatagaaataatggtagatcgagcaagcaaataaagaagaagatgacacaaggggtagcaactggtatgacttttaaaaactatataattagaaacacgatgatgataaggtttagtctttcaaagtcttaagacaatgatatagctatttaataaattttaagtaaaatcatactaagaaaatatataattttgtttgggtgctagccgcgtaattgcgttggccacccaactagttgcttatattttaggacggaggtagtaccctataaacatatacttcattcgtcccataatataagagattttgggtggatgtgaagcatcgtaatacaatgaatctagacaaatgtttgtccagattcattgtactatatttgtcacatctaccacctgattccacctgtcatacacacactatgtcttatagtctacgctgcagctgtctataaatctgtaactcgctactcttatctcttctcatctcttctcatttatattatcgatatgtgtttattatattatcgatggtttataatctagaattgtacctgctctgacatggtccaaaatcgtactatggtaacaaaccatgaaaccaagtccagatatctatgctgattcgatgcacacaagtacagactacattgcatccaacatttcctcgtctttccattgcattttgtggagagatacaagcctagattacatgtagttagcctatggcaacccctgtccgagattcaggttgataaaaggcaacattgacagccactcaactctgaacgtattcgagttggggataaaattacaggcaaagtaaaaaaaaaagtacaaaagttgttatcttacagattatacaatactatatcgacgagtaaaaaccagaattgctcttccattttctggaaaactaaagtggtctcgagcaacatcctaacagcaggacatgcctcttcttcccgccttaatctcatgtcagatttgttatttgtcacctacgaatagtagtactgtggcgtgacgtgtccgtgcgacgagtcagttgtcacaagcacagccttgtcagctcaccgtcggcgacggcctcctctcctccggcggcctccgatcgcagcagctcgctctccgccgcgcacctcttgtacggcatgaagcccctctgcagcagggtgacggacgccgagctctcgcacttggtcagccgtggcgaggccgccgcctccctgctgttcccttggccacgggactccgcgacgtccgaattctgagccgccgccgccgccgccggtaccgccgccgacgatccaagcacgacgctggaggccgtgttcgagcccgtcagcgatccttccctctgcgagactctgaactctacgccctctgaatcacggtggcactgctggttcgcagccgccgccgccgccgggtagaacagcgcgcatggaaggctcccgttgtagctcaaccatggcatgacaggttgcgcggcgaaaccatccgatcgaggaaggaagtagagaaactgttgcatgctgctcggccatggattcgacgagctcccttctggggcagcagcaaaagaaggtactagtatgtttctggttgctctctcaactgaaccactcgttgcaatgttactgccattaagcaggtgcagctggtctgaatccttaaccactacgctctttccgaatagcctgaagactgatgcttctgaggatgcttctttggcatccgtggttgcaattgacatctgaaattcacattcgaaaaacaaaaacagaatttattaagggtgccaataacactaaaagggtatggttatttttccattggcgacaatagatcaaattaataccatgtaaaactgcagatgatcagattgcatatcacaatttgattcagagatactcctacctaaaaggctaaaaaaacctgtgtttctctgaaagtgatgtcagaaattctcgactgaaattattggtcctaaatattgcttttctgatggggaatatcttgtattcttgcaaaattggaagaactaatgccttacaaagttgtccaacatgtgctgcccacgaaagaatataccttagtatttggcgcctgcatagccaactcagcagtcgggatgctcggtgagaggcacccgtcctctctgtccaccgacgacgccggcgagccgccaccgtcgacatgctcatccgtaccggcggctgacggagccagcgacccgctgccgctcgagttattcgagaacccaccgcccagggcctcggtgcctatctgcgccgccgtcagcaccgacgtcggcgagccctcctcctgctcggacagggactgcatccacaacggcggcttctccagctgcctgagcgccgggacgtgcttcttggccgcgccgtccaccttgcgcgggtacgggtgcgccggcttcctcttcggccgcggcggagggatctggatggccgccgccgccgccgcggcggacgcgccgcccgagccggtgttactccccgaagattctctgacgacctgcagagcaccgcgcaatcacagcgtcaggaaactctgtgaaacaacccgcagtaaaaacatgacatcatctgttcttctctcccatgaaaaaaaattgaaaaattggcgacttactttgggcaatcaagtaacacaaccaatggttttttttttttcgtttgtttgttttttcatggcagagatcagagattttttgttgttgtttacatgagaacgaaaggctgtacgaccttagagaagaacttctgcgcgtggctacggatttgcacggcagtcttggtacctatgtgctctgcatccacacacagacgaacacaaacgttacggcacacaggcgaatacggacaattgcgatcgatcgccatgaaaattcgatctgttcgatgagacataccttgtatacggcgccatgcgcggccgtgcagctgcagggcttccaagaacagcctgtgctcctcgtccgtccacttctcgcgctgcttcgtgatcgtgtacggctttcgcgcctggtcgggggcaagcgtgcaaggaaggaacacaatcttttaagagggaatcgagcagccaacgaactcaagcacacaagaaccgcacgggattttgcagcggagaagccgcgattcggggggaggagtaatttacctttggcacgtgctcttcccctgacaaatccatgtcgccgtagttcatatggctcctgagatgatccacggtgctctcgccgccggcgcgatcgtcggcaccgttttcgtcggttgccatggcgtttccctgaatagcacagaacggccacaaaaagaggggaaaaaacagcacacggtcagttcccagtaacatcatttaatccgaaaaacaaagttcattcaaaaacgatctcgccaagaaaagaaacggaaagatcaaactcaatttaccggcaaacaggccatctccattctgaaaaaaccgaactcctcccaaaccaaaccacactccacaggatcgccacaccaaagccaaaaaatcagcgcctcccaaaccccgcaatctttgcgagttttctcctcgatgttgttgatgaggacgacgagatggggggagatgaggaggagaagggaacgaggaggcaaagaagcgagcgttacgtaggccccgtcgcactaggaggagggaggaggggacgggagaaaaagagcatggcgagacgcgccacgtaggactcgattttttccgccaaactttttccctcgttttttttccctcttctcttttcttttggctgcgttttttccccgtctctttttctcctttttctttatttttttccccctataccttcctcgcgcgaaaagaaaaataaataatccggtgggggaattcgggaagccgctcgttcttgtggctggggatgctcctccggcaacctcgctgtcatgtgttgctaatgcgccattagtaattgcccccgctcactaaacttgacacgcgaagataacttgcagagtagagtagtagtagcgacgaaaaagagtattcgttttcgatgacgagcatcatgtgaacattcctaaatcaccaagggctaaatcttatctccccaagattaaaaagggccaccttatcgtgatgccacgtcaacatgtatggcaacacaagcaggagcagcagtactctcttttatcgagcctcacagaatacgggattgctagctagctactcctaccttatcctgcacggagtacagatacagatcatcgaggaattggagtattttcctagtaaaaatccttttgaaaatccgaggaaatatctcagcctctagatttggagcggcatgcggccgcaacgaccgaccgcgctcgtgtggacgggtccggtcgcaaagatcgccgggtgggggcgaggactttgggactttcgctgcgcttttttgacacgtcaggccacgccgctgctagcgaccgacccgagaggggagccgcaatccaccaccgaactggtggtgtccggggccgacgcgcgtcgcgcctccggaagccgcgcgagcggggagcggatagaacgatagtaaaaaccaaggccgcctttcccgggttgctacaaatgggcgcctcctggccacaaaggtgtggggcgcgcgccagaaaattcacgaaaaatcgctggccatgtgtttttgttgctttcttttctcccggtggatgacgcgtggggccatggcgggactcgtccgaggcgcaacatgtggcagtggttgtcttggtacaggggcacaggggtgggccgtggggtgggggagggggatgacgtggcggggagtaaagaatagcgtcgtgcactcggtgcttcgtgggctctcagtcctcagacggggacataattcggtccacgtcatcagatttgttgggatgcagttaatctggatgcacttttgctgtagtcctactccctccattccaaaatagaataagttcacttcatgaccctcaaaagagacccgaatctaatccatgatcttaaaccgcaaaaccggatatcttcacccacaaactattgaaaccggtgcaatttgactcccttggtggctttggagggtggtttcgctgacgtggcgctgacgtggcggtgttgacctagtctgtgtgctgacgtggcactgtggtggcatttcaattaaaaacatatatgtgggacctatttgtcattcacacacacaagattgtgaggcccactgacatgtgggccctacctgtcatctcttccctttcttcttcctcccggacctcccctcctcctcccttctttctttctgttctccctctccacttcgggcgtttgcggggagcgagcggcggtgggctggagctggcagcggggggcgtgggccggattggtggcggtcgacgagagctgaagcggcggcgggctagagatgacgcgagagaggacggcagcgccgacgccgacgagattgagcgggggcacggtggtctacaggccggctacggcttcggatccatccgcatcgccgggatcagagctcctcgtcgccgtcctccaccacctccccgcatccatcctcgcatcgcgcgggacgtcgacggcggcggtgggcacgggacgtcgacgacggaggcatcgagtggcggctccggcggcgtgcgggcgagcacgagtgcgggaggaggcaccggcggcgacagcacgagctcagcggctccggcggcgtgcgggcgagcacgagtgcgggaggaggcaccggcggcgacagcacgagctcagcggctccgcttctcccctctcccttcctgccctcacgcgccgccgccgcctctcgtgtaacccaccacctccgttcctcccttacatcctctcctctcctctctccacttggcgaggctgatagcgaggctaccgccgcagccgccgctgctctggccccgccggccggcgctccagctccagccgctcgtgctccccgtggccagccgaaggggagagaagagaaaaagaaagaaagagagaagggaggaagaagaaagggagagagaggatgacatgtggggcccacatgtcagtgggccccacaatttttattttgtgtgtgaatgactaatgggtcccacgcatattttttatttctaatgccacctaagcgccacgtggaaagaagaccgagtcaatactgccacgtcagcgccacgtcagcgaaaccgccctccaaaaccaccaagggagtcaaattgcaccggtttcaataatttgggggtgaagatatccggttttgcggtttagggtcatggattagattcgggtcacttttgagggtcatgaagtgaacttattccttccaaaatagtgtagttttgcatagttcatgttcaacgtttaaccgttcgccttatttgatttttttatgattagtattattattattagatgataaaacatgaatagtactttatgtctgacttttttttaaaaaaatcataaatttatcaaataagatggacggtaaaacgttggacacgaatatccacggctgtaattattttgggacggagttagtactagattaacttattctaaaacagagaaagtactctctagtatcataggactacaactatctcaaaatgtaagcattttttttgttgacataggcattaaaaatgttactcactccgtcctaaaatgtaacaacttttggctattaatctggacaatatagtttgaattagaggatggttgtaattggttgagaatagaaaatactacctccgtcctaaaatataacaacttttggctataaatgtggatacacagttgtccagattcataactaaaaatacttatattttaggacggagggagtagtgaaggaaaatagttgtgaatagtagaagggaggagataggtattaaacagataactttattttggaataatgtactgtgttaaaaataaactatattttagaacgaagatagtagaacgaagatagtagtactttaagcttattttggacagaataaaatggaaggaaacattgtatggctaaatggtcaaatgattaaaagtatatttcaagccctatcaattggtttaataagctaaagcaaaagctaaaatttaagttgattttaagatatttttaatgtatttttttatgttggcttttaagtcgcagagcaaatatacaattttttaccaataaattaatttttatttcttaataaagttgttttaacttattagaaaatatggccaaccgatgattcttttcatccaccctacaaacgagccgttctaccaataaaaaaagtcgctggagtagtaaatttgatcggagaagtgagaccatttatctattggggcatttgcaaatttgccaccggttttttgaatattgcaaggataccactcgaatgacagttctagtggcatttttgcaattttctagtggcagttttgcaataacgattcaaagtagtggtaaatttgcaattgccccttatctagtctattccgtcaagttatttggcaatgtgttttagaaagaatttattaattaattgcatgcaatgattctgtataacctgatgagtgcgtgtagacttgataaaatggcaactgaatcgaattgacgggagcaatttaatcattttggcatgaagataattttgctgaggaatctaaaaacatcaagatttttgggatagaggaagtaaacgaacaaaatagaattaaaatagcaccttaaagattcatatgcagaacgtttttttttaactttcgcagcattaaattatagctagagcgcgtattcctattatcttccgttttcagtggaaaagaacacatccgggatgcaggtgcatgacaggtgacagccgaagagcaacgcacaagggaaagctacgaaatggtgacctcccatcaaacatgggccgtaacccgtcacccgtgtatcttccatctgcgagtttgcatcgctctgaaaagcaagacgtgcctaggcagtcatgccgaatacgcagtgatcaaaacatgacgagaaatcagaaatatcccactcaccggaaggaggcggctcaatgaatgcgtcgagaatatctcacccatttgcgcctgcacgtctgaagaagaaacaaaagcacctcgtgatgctgcctggagtatatataaacggcacttctccaagatatcgaatggtacaggcagatatcttctagtatctgcacccgttgcttttatcacaacagcacatgcatgcacataaaaaaaacgggtagtcaagcacgtactacttgcgtgtcccgcggtttgggctgttggcaattgccatgtgcttccgcagttccacgatatagcaatatcgaatagaacgtatcctaatagcatgaatctggatatactccctctaaatttatatgattagaataagtctcatctgattttaaattgctatattctaaaacggaggaaattatgaatactagcctaccaaatactaggaataccagtagtaactcaatagtatttcctctgtcctaaaatataagcatttttagcacagtgataagtcaaacatttttaagtttgactattaatagcaaaaaaaaaaagagtaaagaacatcaatcatataaaattgatgttactagatttatcaataaacaaactatcataatatacaactatttttatttaaaatatcttacttttataaatattgttggtcaatatagcatctcgaagaccgtgccatgatctaaaaatacttatattttagaatagatggagtaagattgttggagtactaggctagagtggtacgaacaagttgccggcccttttctgttgctgtggcctaacaaacattcaaacaccaaccgtgagtcgatagtgacaaatttggcatatgaaagctcaaaaccacgttctcctttccttcatggattagaccaaacgtacggcgtcttagtttcacatatatagtgtgtgtttagttcacacgaaaattaaaagtttgattgaaatttaaacgatgtgacagaaaagttggaagtttgtgtgtgtagaaaattagttttaatgtgatagaaaagttgaaagtttaaagaaaaagttaggaattaaaccaggctataactgcagagaagcttcaaaattgctcatatatttgagatttttgttctgcctaagttgttagaactgatatttgacttaaacaaattaaaaacaatgtctcaagtggccttgttcacttgaaacaagattcataaataccagcaaatataactcaactagttagatttcttatatctattccaatttaaattccagatttaatatgggtgatcatttttctgagtaattatatttttttgatagatgatgtccccgtcaacagcaagacacttattataactttgtcaatctcaatatatatcggtccagtctctcggagatataggatgtgcacaacgtgtacatgtgtatgtgagcacatgcatttgtacttatctttttttaaaagaaaattatctatagacatgtaaattaacgtgttaagtgagtgaactgtgatcttttaaataaagggaataaattcggccctccctttagacagtgagaattatgtcgcaataatatttaagattggaaggagagtgcttttcagatacaatatggtagtaataactttagaataactagatgatttgcccgtgtgttgccatggaatattaaaaaatatattttgattcattttaaagcctaaaaatgtccacctataagccattttttccatcaatttttggatgcttactgagttaggctgagctaaaggtacacatttatgttgcttcgggatgaaacactaacactgccagcattgtgggcccacacgtaagtgaaaggggtgatggcgacatattcactactatatccaaggttgttagtatcccgatccgtatcgtaattaccaagtcgaaacaatatagtatcctaattttcatttattacgacacgatattacgaaattatagatagtatcctgattctacgattcttacgattctacaaaatattatttaaaataagatggtttgaaaaataacgtaaatatatatgcttaagtttatataaaaatcagttaaatatatcaaaactaatgtgatttctcttgataaagtctctatttgcatgatatatattattactatgtattttttattgaatggctatttgtaattaatacaaatcttaattaaacttttttaaaaaataaaatctcatagtatcttactccgatacgatgctatttcatactagcagtactgtatcagtatcaagctgtgcatgcgtcgttttcctcctgaccaatcacatccaccacggatatcaggatatgagtatatgacatgaagacgatccacgcttgcagcgccacgtactggtgtgctgctttcagtccgctctaaacggatcagacattttgcacccttctcttgctgatcagccatgggatcgcgaaggtgaagcagcgtggcagagtgcctcttcccgaacgcaagagtcgccctgcctctctctctctctctctcctcagctctgctcgactccggtttgacatttcggcgcagcaggcagcagctggagtacacttctccgacttcggcgatcgactgccgtgctggtacggcggggcccctcgtaccagcacagccagcgcgggtacggcctaccaccggaggcgcgcttgggtgacaggtcgcggacggcgtcggcgcgggggcagctgccgtcccgggtatggctaggagcggtacacgtattgttgagattatgggcatataatgatttaatttattccataaataaatcatgacattacagatgaaaactagcatgaacgcatcattagatctacacatgtaaactacgcagaataacatgaacagatcaaatatgcgcaacatattgaacacgtaccgaggtgacgaaaagaccggctgcttggtcgaaacttttcgcaggtgtctacgaaggcacgaaacacgcgagcgaagaggaaggcgagccgtcgcgaacgaacagggagcagtcgcgcgaagcgcttcccaaaaaccttattgccgccttctcccggtgcaggacgtcaaaggcagaggttccggagacctgctctcccgatcgctggtgcacgccggcgagcgggatggagtagtctacgagcgacggcgcagtacagagtaggaggcaaaccctagattgattttgcatatatactgcgtgaagacggcgggtcggtttatatagagaagggtcgcttgatcagggcgcccgcacgatctctactgcgcgtaaccgaaccggataagtcgcgcgtaacttatccggactccacgccgtttgcacgcaccggatttttcggaacgtttccaaaacaaaaacgaatccgaatttgcagcaaaacaaaactgcaaaaggaggctgcatctgcgcaagggtgaggagccaatttttcggaccattcgacgcgtacgtcgtgcacgcgcgccgcctgccctgccaggccaggcgaggcgagcgagcgcgcgcgtgtgtttcccctcttctctccaccacacatgcttcaagcgactaggagggcatcatcccttttaaggaggtccccctctcctagaataagcaaggtggtactaaactccacatgcatgccatcccatgaggtgggcttttatgattttccaaagaattaatcttcgagtgggctaaggcccattcattaattccaacaatcccccaccaaatctcaaaatcccactgagatttgccttttccaatgtactgtttatataccagtggttcgatggagaccaattaaggttgaacatccacctagaactccaagctacacttactcacaacttgaacaatggactacgccttgaattgtaagtcttgtgcaagcaagtttcacttaaagtcttatctggtactagaccgtctgtagactacccctcgggtggagcgtataagtcatactcctaggtctttagtaagcttcctagaagattcacccaaaatcttcatagactgcgaccaacagtcaagctcacaaaggtgagttctttcaagaatgctctgcaggacaacatctttgctaattaaagccaacagaactcattaaggcatagccaacctgccttgcagctcatgagagttgtcggtgacatgggaccgggagtatcatgacttagagacttgaggcagacacgatcacccacgcggcctaaccccctcggggggggggggggggggtcgggcccgagggtgatacggccgcccttctctttgtctccccgaggggtcggaccgctcccgtctcagccccgagggtcgaggcgccccgaccccttgtgggttttgcgccgcgtatatgtggtaggtgagcatagcggggctcacctaaccacatttattgcggtttggacgagcgcgtcacgccgcatgtaacgcagtgcagcgcgctcgtttatccggtcagtgaccagtcacagaccgatcagatcgtgggttaggtggtgacaggcggtctgacgcacgcctcgccccatcccgtcaggatgagagcctccaatcactcgtccctagccggagccggcgtgttagctcctggagatggcacgttggtcccggtcagatatataccaggcttcatcctaaccattacaagcaagactttgtatgaagaggggcgaacatgcagattgataaactgacgcgtggtggacaagaatgaccgatttgtgaccggtccgacactggtcatgtcgtcagcagacagccatgttcccacgtcgcgcctgcttccgacggaagtggaggtaggtatgggccgtcccatcagaaggtcattcggacggcaaccatacaagtctccgtctgtttatgaaaagataggataagtccccacaaaaaagagagagatggtgcatgtggtatccccttgaggtataaaaggaggaccttgcccacttagaagggggattgatttttcggatccagaaggaccagagagggagagagtaagagctctctggttctccagctcttttgtagcttcttcatacacagatccaccagaacacaggagtagggcattacgcttctcagcggcccgaacctatatacatcgcccgtgtcttgtgtgtttcaattctcgcgaaccttccacacacagacaaggagcttagaatctcacccagggcccccggccgaactggcaaaggggggcctgcgcggtctcccggtgaggagccccacgctccgtcatctggcgcgccaggtagggggttctacgtgtgttcttctaagctctcgcactctttcgtgtgcgccaagcttttcctgttcagcccaatggctgaacaagcaaaggcgcacaacctctctccgagtgttagcggtgacgaaggggagccgaacccacgccgtcgagctcgtactccaccgccccctccacgccaaagtcctaggcgggaggaggcgctcgagagagtcgaaggatccgcgacttcgacatccacgggtgatggggaagggcggcgagatggggagcgtcgcctcctcgtctacggcgacggcagcacgccccagggcgcgctccaagctgcgggcgcgctcctacgtcacccgcccattgtccctgacccggagtctccagcccaacgttggctggacgacgtggccaacttggtcatgacggcacggcagcgcctaggtgctggtgggcggtcctccgccaccaaaacctctggcgctgctaccaccggctccgtgtcgtcaaggcgaagggcgcggcgagcggcggcggttgctcgccattcggccgccactccttcgtcaacgcctccgacccaggaagatctgcgtggggtgccggatgcccgcatcagtatcgagcgccggcgtaatggccgacgtgctgcccacgcaacggagggcgcctcctcgtccggagtgtcacatcaacacggacgcggggatcagccctccgtgcccccggttggtggtgtcggctgtagagcctttgtggcgagccttcggaacgtccattggcccccaaggttccggcccaccatcgccgaaaaatatgacgggagcgtcaaccccgtcgagtttctccaggtctacacgaccgggatcgaggccgccgggggtgacgacaggatcatggcgaatttctttcccatggccctgaagggacaggcacggggttggctaatgaacttgccacccgcgtccgtccactcttgggaggatttgtgccaacagttcaccatgaactttcaaggcacatatccgcgcccaggtgaagaagcggacttacatgcagtccagcgaagggatgatgagtcacttcgctcatacattcagcggttctgtcaagtccgcaacaccataccatgcatccctgcacacgcggtgatctacgcgttcaggggggggtgtgcggcacaaccgcatgctcgaaaagatcgcctccaaagagccccagactaccgcggagctttttcagcacgcggaccgagtggctcgtaaggaagaggcatggacctggaacccctccggttccagtgtggcagcttcggccgcccccggatccgctgctcggacagggcggcgtgacaggaggaggaagaagaggtcagcccattccgacgacgagggtcatgtcctcgccgtcgagggcgtttcgcgggccacccgaaaggggaggcctgcgagcgacaaaaagaaggaggccggcgctcccagtagggagcgcccaaccggcaagtggtgcatcgtccacaacacctcccttcacgacctcgcggattgccgcgcagtcaaaactttggctgagcggacgaggaagtgggaggaggagaggaggcaggagcgccgagagggcaagtccccggcggttccttccggcaatcggcgaagtgaggccaagcagaaggcccccgccgaggacatcgatgacggcgatgatgacctaggtttccaagagcctggggccaccattgccactgtcgatgggggagcgtgtgctcacgtttctcgccggagcctcaaggccatgaagcgagagcttctggccgcggcccctactcatgaggcgacgcgccggacgcggtggtcggaggttgccctcacctttgaccagaccgaccacccaccgtgcgttgcccggggaggacagatcgaaatggtggtttcccccactgtttgcaacgtgaagctggggcgtgtcctcattgatgggggagcagccctcaacatcctttcccccgcagcctttgacgctatcaaggccccggggatggggctccggccgtcccagccgattatcggtgtgacgccgggtcacacttggccgctaggtcctatcgacctcccggtcaccttcggtggatccgccaactttcgcacggagcgggtgaactttgatgtggcggacctcagtctgccctacaatgcggtcctagggaggcccgcgttggtgaagttcatggcggcagtccactacgcctatctccagatgaagatgccgggccccggtggccccatctctgtccatggcgacctcaaagtcgcgcttgcttgtatggagcagcgcgcggaccacctcaccgccgcgtccaagcccgagggaggcgacgagaggcttggcacctccgcccccgccgccccgaggcagcggatagtcacatgcgacgaggtcccggttaaggaggttgccctgggcgacggcccgtccaagaccacacggatcggtggtcttctggacggcaaataggaagacgcgctcgtctctttcctgcgggcaaacgctgacgtcttcgcatggagaccggcggatatgcccggggtccccagggaggtgattgagcaccgtctcgccgtgcggtcgggcgcaatgccggtccggcagaaagtacggcggcaggccccggaacgtcaagccttcatccgcgaggaggtggcgcgacttctggaggccggattcatccgcgaggtcatccatccggagtggctggcgaacccggtggtcgttcccaaggcgaacggcaagcttcggatgtgcatcgactacaccgaccttaacaaggcatgtcctaaggacccttaccccctgcctcgcatagatcagattgtcgactccacagcggggtgcgaccttttgtgttttctagatgcatactctggttaccatcagattcgcatggctagggaggatgaggaaaaaactgcattcattacccccataggaacttattgttatacgacaatgcccttcgggttaaataatgcaggtcctacttttcaacgtactactcggatttctttgggtagccaaataggacgtaatgttgaagcttatgtcgatgacttggttgtaaagacgcgcaaccaagagaccttactctcggatctagcggaaacttttgagagtctccgctccacccgcataaaactgaaccccgataagtgcgtgttcggtgtacctgcgggcaagcttctcgggtttttggtctctacccgaggcatcgaggccaaccccaagaagatacgagctatagagcggatgcgcccccccagcaagcttagggatgtgcaatgcgtcaccggttgcatggccgccctaagtcggttcatatcgaggctgggagagaaggcgctacccttatttaagctcctcaaacgctccgggccatttacttggacggaggaagctgaacgtgccctcactcagttgaaggcgtatctcagctctcccccagttctggtcgcctcggagccaaatgaacccttgctactctacttagcggcgaccccgcaagtggttagtgcggcgttggttgtggagcgcgatgaggacgatcctcattccgcgcacccccaccctgtgctggcttggcccgggagagagcagggaggagaggcccccgagccgaacagtggcccaaggcccccgacgaccggagcaggccctctgcccgcttgtcagacggtgccaggtgcccccgacccccaggatggccagagggccactgcgggaaggccgcacctatcgccctctgaccccgaggataaccctgtgccgactcgacccgggagagagcagggagaagaggcccccgagccaaacggtggcctaaggcccctgacgaccggagttggccctttgcccgcttgtccgacgacgccaggagcccccgacccccaggacggccccgaggccactgtgggaaggccgcccctgtcgtcctccgaccccgaggtcgtcggcacagaagacgagtgcgccccgcgaggccgcttggacaaagagcgccccagggatgtggcccctagcgaagaggatcggccccaccgaaaggtgcagcggcccgtctactttgttagtgaggccctccgggacgccaagacccgataccctcaggcccagaagatgctttacgctattctgatggcttcgaggaaactgcgccattatttccaggcgcatcgggtcacggtggttacgtcttaccccctcggccaaatcttgcataatcgagagggtactggacgggtggtgaaatgggcaatcgaactttctgagtttgatttgcactttgaaccacgccacgctatcaagagccaggccctcgccgattttgtggcagaatggaccccagctctcgagcccgtctcagtccccgaggccagctcgggcccctcgcagctgcctcacaccgcccactgggtgatgcagttcgacggctccctatctcttcagggcgccggtgcgggggtcacgttgacctcgccgagcggagacgtcctcagatatttggttcgccttgactttcgggcgaccaataatatggcagagtacgagggactccttgcgggactcagggtggcagctggactggggatccgccgcctcctggtgttaggcgactcccagctggtcgttaaccaggtctgtaaggagtaccggtgctctgacccgcagatggacgcttacgtgcgccaagtacggcgtatggagcgccattttgacgggattgagcttcggcacgtgcccagacgggataacacggttgccgacgaactctcacggctcgcttcctcgcgagcccagaccccaccgggcgcttttgaagaaaggcttgcccagccgtcggcgcgacccgaccccttagaggagacggacgcgcctgacaggcccccgaggcccgtcggagtccaggcctcgggacccgaggggagcgctcccagctcccttagattgattgcttggatcgctgagatccaagcatacctcacagataagactctacccgaggaccgcgaagggagtgaacgcgtccagcgcatctccaaacgctacgtgctggtagaagggaccctctatcggcgcgcggctaacggaatcctcctgaagtgcattcctcgggaacaaggcgtcgagcttcttgccgatatccatgaaggcgaatgcggagcccactccgcctcgcgcaccttggttggcaaagcctttcgtcaaggtttctattggccaacagctctcaatgatgcggtcgacctggtccggcgatgcagagcgtgtcaattccacgccaagcaaatccatcagccggcccaggccctgcagatcataccactttcgtggccatttgctgtctgggggctcgatatcctgggaccgtttaggcgggccccgggcgggtttgagtatctgtatgtcgcgatcgacaagttcactaagtggcccgaggcttatccggtcgtcaagatcgataagcactccgcacttaaattcattaagggcatcacagcccggtttggagtgcctaaccgtattattacggataacggcacccaattcactagtgaacttttcggcgattactgcgaagacatgggcatcaagctctgcttcgcctcacctgcccaccccagaagcaacggccaagtggagcgcgccaatgcggaaatcctcagaggccttaaaaccaagaccttcaacatcctcaagaagcacggcgattcgtggatcgaggagttgccagcggtgctctgggcgaaccgaaccacgccaagccgagcaaccggggaaacgcctttcttcctcgtctacggcgcggaagcggttctcccatccgagctcaccctgaggtcccctcgggccaccatgtactgcgaggctgatcaagatcagcttcgcagagatgacctcgactacttggaagagcgaaggtggcgcgcggccctccgagccgcgcgctaccagcagagcctacggcgctatcatcagcgccacgtccgggcccgatcactctgcgtcgacgacctcgtcctacgccgcgtccaaacgcgtgctggattgagcaagctctcaccaatgtgggagggtccgtatcgagtgatcggcgtcccccggccgggctccgttcggctggccacgggcgacggcacagagctgcctaacccgtggaacatcgaacaccttcgtcgcttctacccctaaagggggatcgggtgtcaggtttcgggcttgggccaaccccgcacccccctcgggcgtgcagggttggccgggggctaccacatatgtctattcttatttctcttatatctgtatttcaataaaagcattttcgatttcctaaaggctgtatctgtgctattgtttccttttgaaggatattgacttgaaataggtcactcgtgttcaatcctgccctcgggggctcgggtcggctaaaatcgccaaacggggcccagaaccgagccgtgccccagggcgtggtgaactccgggggggaatcggcaaaaacccacaatcgggtaacccataaccctcggtcaccacgctcccggcctggccagtctcgacatgtggatctccccaggcactagccccaacccgagccatttgaggactaggacctgggcacgagcccttgttcaagccaagacacaaaaggaccgcggcacaggcatcctcgtctcatacacacaacaaatagaattgacacaaaaaatttcctctttatttgattgcagattaaattagtctatacaagaagggggcccgaaggactcggaagaagaaaagaagaaactatttaaagattggcgggggcctgggggctcactccgatgcacccgggtcaccagcctcgtcgccactgtcgcccacaccgccgtcatcgccctcctcgtcggagttgagggcgaacgcgagccgaggggccgaaccctcgaagctgtggacgatatggtcggcggcatcccggacctgcgcgcgcgcgccgtcctcggtcccgggagggaactcgtccagcgccgtccatggggagaagtcggggtccctggcctggtaactcgccagtacgagctccaccgctcctcgggcgaggtccctcgaggatgacttaatcgtcccctcgagttcctcggggagccgctggagagtcccggccatctccgagaggcgctgggcgaggcccccctggttggcggcgtacttcacagtccgcccgccccagagacccgcctgccgcccggcgcggtctaaacgggacacggcgtcgcgaagcatgctgggccctatctcgcctgccaggcgaagggcctcgacctccccggtggacgaatccagcgcgccctgcagatccgcgatggtgtgttcggcagctgcgaggcgggcggctaagtcgctgtcgcccgtggccgccccgccgctacgcgcccttgcatccagctcccttgcctgcgcctcgagttcagcggcccgctggttcagtgcggccctctcggcgcgggcactttccagattgcgacgcgcttgttcctcttgcgcagcctcgcggagggacaggctgtccgccagccgttgcgccgcggcctcggcctcctcgagagctcgctcccgctcggtgagcgcgtcctcgcggaggcggagcgcggactcttcttcggcacaggcggcttcgtgcaccgccagtgtgacctcccgaatagcaacggcggcctcgcgatccgccaggtccctctccacggcgcaggcacgctcttccagcgccatggcacgggcctcaagggcttcttcgcgccgccgggatgccacctcggtctccgccgcccgccgttctcgggcagcggcagcgtcaaggaccccccgggctgcgtcgagttttttccctagctccgcctcccagctcccgtattgaaggcggagggtgtcctgcgcctcgttcatcacggtggtggcgatgagggcagccccccgctcctcctccacctccttggcgatctcccccagcaccttccgacggacttcgagctctgagacgtgctggcggtgtgccttgcggcccacctccaccatggcctccaccgagcgtcgcccctcatcgacacgcacccatgcggcgtcgagctccgcccgctctgcttgcagggcctccacctgggcacttaacccgtccaacactgtggtgtttgcgacggctaaggcctgcagaaggggttctgcgctcagtggagcaacggaaggcgtggggaagagccgcctcgaagaggatgccgcgcggcttggcccgccgatggacgtgccggactcagggatgtcccccggacctggtttgatctgagcgtcgcacgagggagtgggcccaagcgatgcgcccgcggcctcgtcacgagttgcctcggaagtcgtcgtcgcctcggcctggcgaagtctggcctcctcccgagcggcttcttcagcttggcgagctcggacggccacctaggcagcttcctcggcttctcgaaggcgatccgcggcctcttgcccgtcagtttcacgggtcgcctcggaggatgtcgtcgcctcggcctggcggagtccggcctcctcccgagcggcttcctcggtctggcgagcccgggcggcctcccgagcggcctcctcggtttctcgaaggcgatccgcggcttctcgccggtcagattcccgcctccgggcctctatggtcgccgggtcctcggcctcaggctggccggacttggaatggcgggagggacgcgacgggatctcgctgaaacagaagaaagaccagaagacaaacaagatggatgagtgaaaactcgcgttgagagaatgaatacggccacgatgggagtgggacgaacctgcgagggggtcggttaaacgaccaccttggaggggaaatgagctttccccgggatggttctgtcccccccaccttgcggagccgtttcttcttccgctccccctcgggctgcgacgtcggcgtggccccctccgggcgcctgctgctggcacgcgccgccccgccccctcggggaggagatgggggaggggttccttcctgcttcctcttcccccgggcgtcggcagggcggccgctccccgggcccccgtcgcggggcccagaagcacgaccccctcccggggtagattgttccccctgcggctcccgcccacgccatcgtggcctcgaggagcccgctcctccgacaccccgaccgcctgcatgatggtcaggatggaggcgcggtctggatcgctgcagagggggaggactccttgaggaatgagggatgcctccacggagctgagattcagcacccgttggaccactatcttgaagtcctcaggagcctagtcccatctgaccccctggtgggtcctcatacagtcctcggacccggtgtactcccaggcgccccgggcgcgccgctggagtggcgcgatccggcgacgaagatagtcgccgaacaccatggcccctgtgagcccctgggatcgcaggcccgccaggcggtcgaggacggcgtcgtagccatctcccagatctaccggcgcccgccagttggaggcctgcgctggaggctagctcggaagtcggaggcgcgcttcgtcggcgaggggggtgtagaaccagtcgctcttccagtcatcccacttcttgcggaggacgcagggaatgtagcggttcagcaccggcccccgtggctggaagtagcaaccaccaaccaccgacggcggcgacaccggctgtacggtgaagaaccaccggaacagccgaagggatgggcgcaccccgatgaacatctcgcacaggtgcgcgaagatggccaatgtcattaccgcgttgggggtgaggtgcgccatctggagatcgtaaaactccagaacatccatgaagaaagaagaaaatggcggaaccagccctgccatagcgaaaggaaggaagaagacggaccgccccgggtagcgtggcgccgggcatccctcgcccagcgagactatctcccggccggtggcagattccggcatgaagcggcgcggcagcccggcctgtctctcgctcacgatgcgggaaggcggcagcacgctaccgtcaagcggagcggagccccgtgccatgatgccggaagaagagatgtttgagagcgagcgcgtgtggcgaaggtagggcacaggaaacaaggagttagggcgcaagcggcgaagacaaggggaataatggcgagaggaaggaagcaaatctcttcctcggcgactttatacccttgccaacgctgtgcccggctcctcgtttctcgcgcccactatcttgccccctcgtttctcgcgcccacgcttccactaatcccattcgcccgtttgcggtgcatgaggtggatatgcggccgtggcagtcgagatggaacatctcgtgcgcgcgttaattacgctcgccgaccgaagcgccatcaccatatctccaggaaaaacgaaccggcttgtcccgatttttggaccggccccacctgtcaccaggccttaggaagtggcgtcacgcccgaccgcttccctcgaggagggcgatcgccctggcataacgccgggggctactgtcggtgacatgggaccgggagtatcatgacttagagacttgaggcagacacgatcacccacgtggcctaaccccctcgggggggggggggggtcgggcccgagggtgatacggccgcccttctctttgtctccccgaggggtcggaccgcatccgtctcggccccgagggtcgaggcgccccgaccccttgtgggttttgcgccgcgtatatgtggtaggtgagcatagcggggctcacctaaccacatttattgcggtttggacgagcgcgtcacgccgcatgtaacgcagtgcagcgcgctcgtttatccggtcagtgaccagtcacagaccgatcagatcgtgggttaggtggcgacaggcggtctgacgcacgcctcgccccatcccgtcaggatgagagcctccaatcactcgtccctagccggagccggcgtgttagctcctggagatggcacgttggtcccggtcagatatataccaggcttcatcctaaccattacaagcaagactttgtatgaagaggggcgaacatgcagattgataaactgacgcgtggtggacaagaatgaccgatttgtgaccggtctgacactggtcatgtcgtcagcagacagccatgttcccacgtcgcgcctgcttccgacggaagtggaggtaggtatgggccgtcccatcagaaggtcattcggacggcaaccatacaagtctccgtctgtttatgaaaagataggataagtccccacaaaaaagagagagatggtgcatgtggtatccccttgaggtataaaaggaggaccttgcccacttagaagggggattgatttttcggatccagaaggaccagagagggagagagtaagagctctctggttctccagctcttttgtagcttcttcatacacagatccaccagaacacaggagtagggcattacgcttctcagcggcccgaacctgtatacatcgcccgtgtcttgtgtgtttccattctcgcgaaccttccacacacagactaggagcttagaatctcacccagggcccccggccgaactggcaaaggggggcctgcgcagtctcccggtgaggagccccacgctccgtcaagagtatatgcatcttcacttggagagggtatatatattggtactctcctctagtttattaatggtttgttcttcccaggatctaattcacgggatctccgatcacatagactgggttaccaccatagtataactcacatgggtctcaaacccatctccttcgatgcattgtctatcacatttcgtgatagtcccttcgtgaagggatctgccaggtttctcgctgtttggatgtaatccaacgttataactccggagtttcttaatttcctgacagacttcaatcgtcttttcacatgtctagacgatttcatattatccttagaactattcactttgacaattaccgtttgattgtcacagttcataaggatagccggcaccggtttttcaacaacaggcagatccattaatagatcacgcagccattctgcctcaacagtagcagtatccagtgccgttagctctgcttccatggttgacctcgtcaaaattgtctgtttgcaagacctccatgaaacagcaccaccacccagtgtgaaaacatatccactagtggctttgatctcatccacatcagagatccagttagaatcactataaccctccagtaccgcaggatacccagtatagtgaagccccaattccacagtacctttcagatagcgcattactcgctcaagcgcacgccagtgatcatctcccggattagaggtaaatcggctcaacttgctcacagcaaaggagatatcaggcctagttgcactagccaggtacatcaacgagccaatgatttgggagtattccagttgattcctagcaattctcttgttcttgcgaagcaacaagctaggatcataaggtgttggagaaggcttactatcaatgtagccaaagcgattcaagatcttctccacataatgggactgcaagagtgtaatcccattctcacctctaattagcttaatgtttaagataacatcagctactcccaaatctttcatatcaaaattttgagacaagaatgatttaacctcatttatcacctcaaggtttgtcccaaatatcagtatgtcgtcaacatacaagcacaaaataactccctcacccctaccatggcgatagtacacacatttatctgccttattgactgcaaagcctgcagatgtcaatgttttgtcaaatttctcatgccattgcttaggagcttgtttcagaccatacaaagacttcaacaatttgcacactttgccttcttgaccttcaactacaaacccatcaggttgatccatatagatctcctcatccagctctccattaagaaaagctgtcttaacgtccatttgatgaacgagaagaccatgtgaggctgctagggaaagtagcacacgaattgtggtcaatctagcaacaggtgagtaagtgtcaaagaaatcttcgccttctttctgagtatagcccttagcaacaagccgagccttgtacttttcaatagtaccgtcaggcctaagcttcttcttgaacacccacttgcaccccacaggtttacacccatagggtcactctgtcacctcccaagtcccgttagcgataatggaatccatttcactacggacagcttccttccagtagtctgcatcaggagatgcatatgcttctgaaattgacttaggagtgtcatccacgaggtacacagtgaaatcatcaccaaaagacttagccgtcctttgtctcttactccttcgaggagcttcactgacatcctcctcagagacaagttcatgtgtatgttcagtttgttctggtggtgtgattgaactgggaattatttcagagggttggttcgaaccactatgtgtatccttcattggaaaaaagctctcaaagaaggtagcatcacgagactccataattgtaccaacatgcatgtccggtacctcggatttaactattaaaaatctataggcaatgctatgatgagcatatcccagaaaaacacagtccacagtcttaggtccaagtttgcgcttcttcgttattggtacattgactttcgccaagcacccccatgtgcgcaaataagaaagtgatggttttctaccaatccatatctcatatggtgttttgtccttatttctgttaggaactctgtttaacacatgatttgaggtcaacaatgcctccccccaccatgccttaggcagtcccgcggtgtccaacatggcattcaccaagtcagtcagtgtgcggttcttcctttcagcaatcccattagactcgggagaatagggaggcgtcctctcatgtatgatgccatgttcctcacagaataagtcaaacttgttcgagaaaaactctccacacgatcagacctaagcctttttatctttctgtcaagttgattttcaacttctgccttataaattttaaaatagtctagagcctcgtctttcgttttcaacaagtacacatagcaaaatctagtagcatcatcaatcaatgtcatgaaatatcgttttccacccttcgtcaacaccccattcatttcacaaagatctgaatgtaggagttctagtggtgccaagtttctctcctcggcagccttgtgaggcttgcgaggttgcttcgattgcacacaactatggcacttagaacctttgacaatggaaaacttaggaattaaacacatgctggaaagccgagacatcaagccaaaattaatatgacataaacgtgaatgccaaacattagcctcatcatccacactgccacaaatatggtttacagatttattgcagaaatcagaaagggaaaagcggaacatgcctccgcactcataacctttaccaataaaatatccatgtttagacacgactactttattagactcaaaaaccatcttaaattcgtctctagtcagacgggagccactaacaagattcctgtcgatagaagggacatgctgcacgttcttcagctgcacgatctttcccgaagtaaacttcagatctaccgtgccaacaccatgaacagaagcatgtgacccattccccattaggacggtggaaccccgtgcgacctgataagaagaaaacaatgagatgtcagcacaaacatgtacattggccccagtatcaacccaccaattagtagattgattaactgaaaaaatagtaggtaaattaccatacccgcttccatctccagtgttgccaatggtcacattagcagacttagaagtctgccctgcaggtgccttcatccccttgcgctgtggacacttcctagccagatgaccaacttggccacacacaaagcaagtcctctcatcctgattaggattgttgttgttcttcttctgcttcttgaagttggtggtctgctaagctttgtatttccccttgctcttgttctgggccttgtgcacaacattggcgctggactgcccaccatcgcccttagacgcggcatctttttcccgagctttctcctcaacatcaagagacgcaatcaacccctcaacggagtattcctgtctcttgtgtttgagtgcagtaccgaaactcctccaagatggaggtagttttgcaataatgcacccggccacaaatttgtcgggtaagacacacttaaggagttcgagttccttagccatggtttgtatctcatgagcctgttcgactacagaacggttgtcagccattttgtagtcatgaaactgctccatgatatacagatcattgctagcatcagtagcaccaaatttagtattcagtgcatcccacaactccttagcgtcggtcatatgcatatacacctcgaccagacgatcgccaagaacgctaagaatgcatcccacaaagagagtagtggcttcctcgaattgcttctgctgttcagcagtaagaactccttcaggtttgccagtactcacccagaagcatttcatagctgtcagccacagagtgaccctgatctgccatctcttaaaatgcacaccggtgaatttatccggcctcagtgcatcggcaaaaccagccatagtaaaatcacagtgcctataataaggtttttggattgttgagattatgggcatataatgatttaatttattccataaataaatcatgacattacagatgaaaactagcatgaacgcatcattagatctacacatgtaaactacgcagaataacatgaacagatcaaatatgcgcaacatattgaacacgtaccgaggtgacgaaaagaccggctgcttggtcgaaacttttcgcaggtgtctacgaaggcacgaaacacgcgagcgaagaggaaggtgagccgtcgcgaacgaacagggagcagtcgcgcgaagcgcttcccaaaaaccttattgccgccttctcccggtgcaggacgtcaaaggcagaggttccggagacctgctctcccgatcgctggtgcacgccggcgagcgggatggagtagtctacgagcgacagcgcagtacagagtaggaggcaaaccctagattgattttgcgtatatactgcgtgaagacggcgggtcggtttatatagagaagggtcgcttgatcagggcgctcgcacgatctctactgcgcgtaaccgaaccggataagtcgcgcataacttatccggactccacgccgtttgcacgcaccagatttttcggaacacatctgcgcaagggtgaggagccaatttttcggaccattcgacgcgtacgtcgtgcacgcgcgccgcctgccctgccaggcgaggcgagcgagcgcacgcgtgtgtttcccctcttctctccaccacacatgcttcaagcgactaggagggcatcatcccttttaaggaggtccccctctcctagaataagcaaggtggtactaaactccacatgcatgccatcccatgaggtgggcttttgtgattttccaaagaattaatcttcgagtgggctaaggcccattcattaattccaacacgtatggtgtgcgtgcgtatcttggctggctaagcttacacgtactagaccgggttaggagccgtgttgctggagaagtgcccaatcgttgagcggcatcaccatcggtagcggcaggacaggacgaacgattcaagcggtggttccggctgctcttcactggttggcagctgttatcttttgggttcttctgtttcaggggcgaaggcgacacattcgtaaactgatctcaacgtacgtttcatgggtttggtacttttgattatcttctcttccgaggctcccccgagcatgcatgggacctaatgtctccctgtacctgagctgctctgtttttccccgaaaggaacggggccgaggaacctgtctctagcagcgtaaacacatgacgaagaaaaaaaaggcgaaactatgaccagtactaatctaaaataaggatagtagggccagtacgaaccgtatgttaattgttggccgaatacaaaaggaaggtgattttccaggcccggaacaaacttgtctcgctccaaacgaataagttcattgggggtccctcatcttaacgtcgcgttcaaatttcgtcctccaaccacaatactagatataacacgtccctcaacttgcaaaactagtgtactatccggttttggctgacattacgagtgaaccccatatgtcatgtctagttcttcttcctccaaccttccctcgtccatctcctattccacgtgaggttcttcttcgtcatgccattcagggaggtcaccatgatggcgttgatgctcaacatccgcggtatcatggaggtggctgccatcaacaacttgggggatacgatgaaggcgacgacggagcactactcttggagggggcacggcacgaacgaccataaggcgttggcgtacataacttggatggtatagtgtggtagtgtgatggtgacggcggttcgactgaagctgcggaattgggtgaattgggtgggaacgagagaggagaggggagatggtaatatgcgctgtttgagatattgggtacaccggttttgcaagttgagagactcgttatatccagtattacgatttcaaggacgacatttcaaactcggagacaagataagggatttaaaatgaacttattccagctccaaatgtacagagcggccgggcgttagcccagatcaccacgagtccagcagtccaaatgacattggtactagttcgctaccagcaccgcttgcacagttggacaccggcatcacaagcctaaaaaaatactccagatacaggtaatagtcaagcatcacaaaattccaatttctaagtagtgctttgctgcccacttgagtcttgaccgacctacatagatgacaaaatttccggaaaaaagatacacacgacgataatagataagaaaaacatattctgtggcaagcaaccaaagagcttactaacatacaatcagagaccgtaaatgtttataactttactcactgaagatttaaaagacgacgcaggttgcacagggatcatcgaaataaaatggcgagtcactactcactaatgacttgtagccaggtgattctgccaaagcaaccagttccaaccattcaaaagtgcacacagaattttcaccgatttttttaattctgagcaaaataagaaatatatttttttatgtaagcaccacagccatctaattctattaataagcaggacgttctgattcaagaagcgtccatctgtttgatagggacgctgtcatttggcagcgactaatttggacgcaaggtttttactgcgttcctggacagaacttggacgccaaaacttaacagcggcctccgccgagcaactgcacgcccgcaacatagaaaagaaatacagatctacgcattggttagtgtctttctttctatccctaaccttcccttactgcagaagtcatgccctagtcttatatcagatgagattagagtttaagcagagatcacgagtaagattatttgcaaggtatgtttacttttcgttgtttggaattgattagacattagtactagtcaagtagcatatctctccgagttctggccagatggttcttgtaatctcatctcacattttgtgaatgaggctgtagctgagtaatatatcagttttttccccgtaaaaaaaactagcagatctgttgtatcattttattcttctatcatggaaaggttgcggcactgctaatcgaaagtatgagtaaattactgcatgaaatgattatatcatcattagctatgtgctccacgttagtagtgctctgtgccatgtatatactaaatattctgatcatgaataaatcgaatatggaaattgatatatatttttcttttctttattactattaggtcatcagaccatgataattgttcttgtatacactggaggtgaaattgtatatggagcgactggtgcagagtatagcattccacccaagattacttttcctgcttccgaagctacaactttcgaagatgtaaagaatgagatttatggagggctaaaatattctgaaactgaatattcacttgttatacaaggccgatatgatgtaggagcaccaagtccacattttttccagttgatcccattatataagaccagatcatggcaaatgatttttgacatgacattagcactaaacagttggcgtatggtggaattatatgttgagttcactccaacaaatagtggattcagccaaaaccacattgttagtgaaataataagagaaaacctagaaccaactatggctacagttgctgagaatattgtgtcagcatcacatcagtcgcctaagcatggtatatctcctaaaattcatgatgtgagtaattctgcaccaattgtgggcttgtcttctgataatatcataaatgaagcgcaagaaaattctcaagatgatggctatgtggacgaagagacagaacgtgagggtgatatgattgaggaagatgagagcgatggcgaagccgaagaggatgtgaatgataacacctatggtcagcctgtggtcaaattgatcaaatcgttgccactcgtgggcaggtctgacaagcaccctgtaagtgccttccatgatatatctgtgctacagaatacaacggccgatgagagattctttggttcgaggaaacattttaacagtccattagctaaaggccgaacttttgattccaaggagcatttgcagtttgctattaatgaatttcacattagtaccaatcaagaagtaaaggttaccacaagtaacaagtcaagactaagtatgaagtgcatagacaatacttgcttgtggaagctatatgggaaaccaacaaaaattggttcaagttggaagatacaaacttgcccctatcctcacacatgtcgagctcccgctgatcgacttgatcgtgcacaattgacatctgcagttattgcagatgttatacgtgatgacttaaaagagaacttggagttgagcataatgaacatacggcaattagttcggcaacggtataaaaatgtaaagccacactacaacaagttatggcgtggccgggagttagcaattgctcaactttttggaagttgggaaggatcatatgcattgctcactccattattggaggctattaaagcaactaatcctggaacaagatatcaaattttgtcacaaccgatgactcgtgaagggcatcgagcattcaagtgcgtggcttgggcttttggaccttgtattgaagcagtaccttatcttcgacctgtcattaatatagatgcttcttttttgtctggaaggtaccgaggtaggttgttgatagcatgtggatatgatgctgaaaacaaattattacctcttgcatttgcaatagtggagaaggaagacagtgacaattggggatggttcatgagatggttgcggaaagaggttattggttttggtaaatttgtgtgtgttatttctgatcgccacaaagctatcaaatgggtgttcaagcagccacatattggatggaatgaaagtgctggtgagtgtgtgcatcgattttgttcacaacatattgctgagaatctttacaagcaatgtaaagatgatgatgtggtaaaaacttttaattgggttgtcaagaagaagaaaccacgtagattcaatgaaggtatggaagctatttcaaaaacttgtccagatgcaattgcttatcttggtaaggtgggaaaatatcggcaagaagataagaatgagccggaaaaatctaaaaaggttttccagtgcatggatggtggacatcgatgggggataatgacaagtaatggctccgagtctctaaataatgtgttcaagtactcaaggagattaccagtcatggcaatagtggaggaaacatttaacaagtgcttagaatggtttattgatagaagaagatcttctcttgatcttgcaaactcagggaaaatgtggtctcgacgggttgagaagttattagtgaaacgaggggccaaggccggatccatgcatgttatatcatatggtgatgaaagaggagaatatgaggtgaaggttgaccgtgaacgagttgcattgcatcaaggagatcgtgttgtgtatgttcgaagggatttcaagtataagctagttatgcgcaacaatgctattccgacatgtgagtgccaaaagcccaaccttactagtattccttgtgctcatgtgcttgctgtttgaaaagatagaaaccttaatgagaatcagtttatccatccttactactcttctacaacactcgcaaacacttgggctggtcagtttcacccatatggaaatcaatcggagtggccaacttataatggtccaattattgagcctgatgctaggttgatacagttgggtcgacgaagacataaccgaattccaatgtatatggatgaaatgcaaggtcgacgcttaggacatcaagcacgtcgttcaacccaagataaaaatcaagccggtctgtcataatttaattattgtatgatatatctatgcttcctactaatatagaattaacactgcaggtgtgccatctcaccaacatcaagggtgatacaatccataggatggactccgctgcatcgccctagaaatttatctagcaaatctacttctagcttatattataaaatttggatttagttttctgtgagtaaggacttcattctcatgtaacaagcttgatatttttaaagttccctattgacaattagttgttatttttgtatcttgacaaggacaacactgcttgtcttatttcgctcaatgtgatttgaatggaaatggcaggaggttttttttttttgatacgttgaacaggaaatacaagatacaggttaaaccatatgtatgtaaaaaaatagattctaatttatagaacttacagataaacaaagaaaatcacaagctttgataaaccaaataataacattgtctaacagcaggagtaacaaaaagctctttgccctgatctatgctcaatgtttatcctgagattccagcacatcagaatctgtacctaaactaaggtatcttgtaaatcccctgtttgagtacaaccagtcatccatcacatccatgtttatctcctcaggtttaattggtttaggggtagaaaatggtgatgcactatcatcagatcgaatgtcatctacacataaaggtagacctgactcgcttagcatgctgcttaacttagcctccatattgatatcctggacgttattgtaacatgtacagataagaatcttgcccatctttctccatcctctactcatagcacatttaattctccacgcaacttgtttgatagaacgtagagcctaaattagcattttaagaaaaaagaagtgttattaagtgaattattgcaagtaaaaaagaacaagtaaagaaatgttagtataccaatcgggagagaggtggaccactgggcatgtaaccggtccaatcgaagttatccagtggataagggatgggatcccacaaaccttgagcggaccgagcatccaaaaaaacagtgtacatcccatactgttgaaaccaatgacgatattgtggcaaacttgcctggtcaaaatgttgctcctcatcaaccatgctttgccaaattctattgtattggttaacatattctgcgtggagcttcctccaatcacgtggtttccctgtatgatttattttatggagttgacgaagcttgctctcatcatgtgggggaggaggtggaatggtttgctttctccctagttgtctcatcactctatctggataatgaaattcaatgatccaaaaatggatgagaggtactcgactataccagaaagcacgttcagctctaactcttcttggcatggacatcaatagtccattatatggttcccaagagacctcattgtcttgaacttgatccagcaagttctgataaaacgcaacacccgagttatgtggcagaggataaagttcctggccacaccattttgctccaaatgtaggacaactctcagggtctggctctccccaactaatagggttcctatcttgatccactggtcgtcctggtctcaaccgcgaccaacaccaatgctgcagaagcactaatggaccagccatctccaatctctctcgttctgcaccgaagcttaattgtctatatagcacggcaagagttgttgccccccagttgtactcctttggtttatcaagatcctgaaggaattgcaggtacattgcaggcactccatctcctgatgtatccgggaaaatcattgacccaagaatatccaaaatgaatgccctagtgtaatgttcaatttgttcttttgttgcattttctggcatctccttgaactgatctcgtaatttctttaagctgatggagtagttagaagatgtcatatttcccccgctttccaagtcaccgtccgcctttcgctttttttgcttcatcacttgttttcctggagtaactcctagtaatgtctcaatttcatcaacccatggcccctctaacttgcctataataggctcaccttgaattggtaagccccatagacaactcacatcttgtaggctaactgtcatctcttcaactggtaagtgaaatgtgttagtctcaggccgccatctctctactaatgctccaattagaaatctatcaacactcatcccaaccatctgggaaacttgatagaatccaagtctcttcagtagtggttcacataaataatggtatagaatgcccacgtggtgatacctgacactaacaccatcattagcctgcatacgtaggatacaaattagtccaatcattttttttggaaaggtatatgacagaagctagcaatagcttacattttcccaaacttttgagattttgtgctggcaatgaggcatccatagtaaggcactgatacgttctgaaacatttagttcagtttgctgaactaaagtttgatctccatccagtaagcctatctcctcatcacttattgtaactaaccgacctaacccatcttgattagtcctcatcttactagtttgtagcatacaaaaaattaaggaagcatgtcaaacaacgtacaactgatttctttttcaggaacttataaacaagcatcgtaagatgattgatcaaaagtaaaactaatttctagattatttgcacacttttgtttccttatagtcgcattgttatgttgacagaactgggataagcagataaactagcttacaaagcttgttaggaagctaggatgcatgttgctatttgctaataactaatctgtcattgtcttataaagataagcacaaaaattaacaactaatgcttaatgcagcagcactataatgtatcactaaagaaagagaatgccgcacaacgatttagtctccaacgaaaaaaccaaaagagctcatcatgtgtaagacgactaacctgatggctgagagctagtcgcgtgggtgcgtacttagaactgacgacgacggcaagcttgataccttaaggctcgatcaagagaaataacgggatgggtaccgccgtcgccacgccgttaaggtttgtggccgctggtttactcgtgggttttcagattggggattttacggtgataggatgcagaagaacagggatactgttttcagagccctttggcccgtgggctatggacgcaatgagaacatcgcgtccgtgagaaggccggacgctctagatcggtggcgtccaattgttttaatgggacgctgcggaattacgttgtcctgcttacgaataaaaatccaatacctcagtgtttacataaaaaaatatattttttgttttgctcagattaccaaaaattgggaattttcacatcagtatccatctgttgtgatgtagtacgtagaagaaaaacagcatgttgtgattattccgagcatattgcaagcatgaaaccaactttttagtacctgaaataggtaaatgtacaaaacaaaaaccaagttgaaagcaatgcttgctctagcgtaaaactctgatgctactgcaatgcagggcacaaaacctgagctgctaggtcaccatatcatgaaatagcatcgaatcctgaaattctcgagggacctactgagtcgacaaacccacggactgaaagttcaggaacagaaacatttttctcctgaagtaactcatggtcgatgtaaacaacgacgactgtaatgtcgtcatggaagaagcgccgcacccctttttcgactttcttaagatcaacaaacctcatttctcgcttccgtgcagcttctttcaaagctgtgtttactagcctctttgcaattccctaccaaaattatggaaattagatttagcacctttccaagtaatcagcctaggcattgcgggatagtcccacaaacaaagaaaaacaagcaacgacacatgtaagtaaaggtctgaagacatactgctcgtggatttttgtagacgatgtcaacagcttgttggtttgttaagtgctcccaaagaccatcggatgcaaaaataacaaattgatcttgcagagaaagaactcttgtgcagatagatggctctgctgttagaacaggtcggcgaagaggctcagaaaggcggaagcgagttatggatggatcaagagcaaattcacgcctctttaaatatgcatcacctatagtccttgaaacctggtaagtaatcacaaaatgtgacaatagttttacatcaagtacctagtttgcatatgcggaaaatcttgataatgtactgctcaacatgtttgggccatcattggggaatctaaatgacacggcagtatttcttgttctcttactaccaaaataaataacatgatcaccttcataatctcttgtaaactacaagaaacacaaaatccttctaaagcacaaactttaatttctatgatttgttgccctctacccctttacttggctcctctaatgggttgttgtgtaacaagtgaatatggtccaatcattaccaaattaatatacaatcacaaccatccttgaaaccatattatagttgtaatagttactcaataactgttgcttaccaacctggattatgccttttatgcgccaaacgccatgcttcagaacaacaatttgtgaatcatcgggatgacgagaaataagttcctgcctcacttcctccttacaagcattatgatcccttgtaatttgctcagcagtaatcttgtttgttctacccaaatagccaacaactgccctagaatcacctaaattagccacatatagtacccctctccatatgataccaacaagacaacaagatccaactgcagctatcataggctttaaaaactgcgttctccgaacaagtgtcaagaaaccttcttcggtagcagaaaatgcccctcgaacaacttcctccgatactgtttcactttctcgggcaagtcctagaaagataggaaaggttgagcagtcattttggtgcactgaacaatttcggttgagatatgcttgccatttattaacgacaaggataaggtcacatcatgcagtcagtggatacacttactcagtagcatctcacgtaaatcaagtcagtctgtaagtaaaagacaacattaagatgttgaacacgacaagaaactacagtacctactagtaatctgttattgcaaaggaccaagaatattgatagcttgtccaatgatcagattccactcagtcactggtaagagcattgcgttgtccattgcactgctcatgaaacaacagcatactcgatgagtggaatgtataccaacaagaattgcatccagcaaagagcaatcaacaaaggtaactccaatgattcagaataattacagaaccaaaaaactaataaaggaaatgctactgctcagtgcatagccaacaggtgcatcatgaagcaactaaagagtaaaaccacacaaaattcattcatcaccacctacaagttgaaactaaactaagccatgaagagttgcgattaatgaactggagtggattctattgcaagaagaacagtataaggaagcgactacttacgtatcaggtgtgcgaagaggtgatcagatatgaagcgagcagcatcggcaccgccgtggccgtcgtagacgccgacgaaggtggcggcggagcccgtctcgacctggctatggtcttccaacgcctcgttggcctgcacgacggcaaaggagaactcacccgccgcgtgacgccccaggtcccgcgaccacagcaggccgtcggcgacgccgccgccattatcgccgccatcttcatccttcctcgtacgcgcgtacctccgggccgggcccaagcacgcggacgcaatcctcaacaaccacgagaacatccctcatttcccttctttccctcctctcgaaagaagtcgcctttggaaccccaaaggaccaagaacgcccaagaacaaacttgaacaccctaagtgacaaaaaggattaggtttctggaggactatcccaaatttaatttctagaaatcgaaaaatagaacgatttgtagttcaattatacctgtcgttgcacttgcacctcaccagaagaatcacagattgcaagtgaaattaaatctgggaattgggggggggttccggggttaatcaccaccacacatcccccgagaccagccgaaaacaaagagcagattgccccaatttagtgcaagaattgggcttattatggaatgactagccgaattatcggctaaattggtttttgacttttagatcgcgaagctcggtcagcgcggggaagacgaagagaaagcgggggacccgtactatagttttgagtgatacccctgtcgttgaggttatttacgaagatggcaaccgaagaaaagtgcaaaaaaggtcccaggaaaaggtccgtgagaccgtgaccacgaccgggatgtgttcttgcaaaagggttgggaaggaaccggaacaagcagcacaggattgttgcgttgcgcgtcggccaaacgctcgccgcgacaagctacacgtatacgccgcgacgcgatggcataataaacctcatccgtccacggccacgcgcgaccaaaaaagcgcggccgctgatgtccaccgaccaccgctcgcttcagcggcagcctctcgctgattacttcgcgttcgcgtgatacggaacggtgggtggtggagctagtggtgtgtcgggaggcggatgggatccgcgagccgagtcagatcgcactatcgcgcgacagcaagttcaataatacagccgactactaacttcaattcatctatagccaatctaatagcttattcatacaatagttatatactacactattaatatctggtcccacctgtcatatacacactgcgtcttagagtccgtgctacagctggctacaaatctgtagcccgctactcttctctctccttatttatctttttaaaatatgtttgtagctagcttatagcctgctattatacctgctcttaatctgaagcttatctgcaacggtgattactgtgagcttttagctcgtgcgagtcgtggaaaccacgggtgaacagtcacaggtcgatttccgagatcacttcgcactgtgctaggcgattggagtactcctttctgtgaacgtcgactcgacctcctctttgtgggacatggtttttgagtacttatctacgtttaccgcacgattgtgtttgaattaggaattaatccttctcgtgaacagacgaagtcgcgctaggactcatcgcatgatcacgtggttgcgcttcaagccaatgaatgtaggtttgctagtaaaatggattagggtcaactaagctctcacagtttgggtgagagcttatcagcttaagatgggcaatcatgccgtatgggccatagcgcgaggcccagggagaacatgagcagattgtgccctatgaacccttttcttgccttgcaacggggagaggggatcctttggaataagttcatctaaggtgccttaactttgataacgaatccgattttcgtccttcaaccgcaaaaccagatacaaggggtccctcaactatcaaaaccggtgcaaattaggtccttcagcggtttcgatggtggttttggctgatgtggcgtctacgtggctaattttgacttggtcttgatctgacgtggcgcttacgtggcaattcaattcggaaaataataaccccgtgggatccatatttcagtttcacacacaataataataataataatggtgggacccacatgggccccagatgtcagtctaactcatcccctcctcttctgcttcatctctctccttctcccctctcttcatctctctcttgcgctgggtcattctgattctcctcttcctcatcttctctgtcttcatctctctcccctctcctctctctcttctcttcggttgacaggcggcggggagagggcggtggccggcggggagaaggggcgcgacgcggcggctggcgggagggaaactagcggggagaagggaaccagcccggcggcgccgccgcggccgtggctgcggacgacgtcgacgtcgacctcagcatcctcggcggcgggatgaacgtgtctcgccgaccggccgacacacgcgcgcatcctcggaggcggccgtccgcgcgggtgggtgagggggccacctcgccggcgggagaggggagaggcgaccagccgcgaagacgaccccagcgacgattacgaccgtgcagcgcgcggcggaggccgatcccgcgagcaggaagctcttcatccacggcctcggctggggcgccagagccgatgacctccgctccgcgttctcccgcttcgacttctttctcttccgctcctctcttccgtcggctcgcgctcggcaaatcccgcgtgtcgtcctcctcctcctcctcctccttagtccaaccctcgtcgtccaatctccggctcttctcctaacgacgtcgcggtggaggagggcacggtgctgtgcattccaccgaggatgctgcacggcgcgtccatggagttgcttagtttgcgttctgtttggtcttaattttgtttatgtgcctaatcatacaaaggtagaagcaatagcaactagtactagctgactggagtatattttgcttcgtcatcatcatttgcttgtggtacgacgggattgatgaatgaatgaatgatcattgttttgggcaagaaaacaccgttccggccggactgacgaggaacccatcgatccgctcgccgcggcccatggaaacccaacaggagatggcggcgttaccttcggccgccagcagctaacaacggtgggtaatgctcgagcacattgacgaactcgaggtcgacgatgaggactccaactacaactcctgctccgccgctgccgacgacaccgccaataccgtgagtctatgacgacctttttcacctccgacggccacgtcatcagcgtatacttccgcctcaaagcgccgcccggcgcgtcacgcctatgccccggcgcgctgctccctcctctcccgccggtgggaaggagctaggcgagctccctggcctaccggcgagcgcgcacaagagagagatggccggcggccactcttctccatttccgccgccgtcgtcgtcgccggccgcaagagagagatgaagagaggggagaaggagagagaggaagcagaagaggagggggtgagttagactgacatggcgggcccgcgttggtcccactattattgctattttttttgtgaaactgacatgtgggtcctatggggtttattattttctcagatcgaattgccacgtaagcgccacatcagtgccacgtcagattgagaccaagtcaaaattagccacgtaggccaaaaccaccatcgaaaccgccagggacctaatctgcaccggttttaatagttgagggacccgttgtatctggttttgcagttgaaggccgaaaatcgaattcgttgacaagttaagggaccttagatgaacttattccagatcctttcaaccggatgattcggtcctcatcacatgatttcgcgcacgaatagtcccgatttgcttttgtagtcgtaatgattgtgaatcagacgatatggcaccaatcctacccaaacgcattttcttcttcttttcattcatctcatccgattagatctcatccgattagagaaagtttaataatataggaccctaccagctccaaaatttaaaccatcatctaccgtcaatctaataactcactcatataatagttagctgtagaaatatattgtatcattaatgctccacccatctctctcaaatagtttattagagctcgtgctgtaactgactacaaatctgtagccggtttttttacaaatctgtaaccggtttttttatctctcttctcttgtctatcttccacacaagtacaaatttgataaggcagcttgtgtagccctcttttatccgactcagagcaggtacaatagcaagctattagccagctgtaaacatattttaatgagataaaggatgagagagaagagcagcgggctacaaatatgtagccagctgcagcacggactctaagacgtaatgtgtgtatgacaggtgggaccgagtattaatagtatagtaagcaactattgtatgaattaactattaaattggctagagatgaattggagctagtagtgggctatactattaaacttgctctcaactctacccgtgcagtcatctgcactccgctttgcgggtaggcacggctatctagctgtaacctgccgagaccttcgaacgattggttacagaaaagagaccgccttgggggaagggaagcatcaagcgtttctactgcaacttggggtgccaccacccacacgaacgcccctgatcccccgccgccgcacgttgcccgcggaccattcggtggtccctttctctccccttgcacgaacccgtcttgttctcaccgacgacgcgctggcatgtattttcaacgtcttcttctgtcgtgactcgtcagtgtaccagcttccatagacccttatctgatagagtacgtacgtacagtattcaggatgtgaatgttaatgtatgcaatgcacgcaggcagcaaaatactggagaactgtactactactaataaaactatcaagcattaaccaaacgaataatgaaggaaggaaaaggcaggatccgaagaatcagcaggaccatcccggttgctatagccagtgtgggggcagtggcagtggcaggagtaaatctatcggagtcctgccttcccagcaggagcagcagagtcgcggcgccagagcgacgctggctgcagcctgcatgtatgtcccgcgacggcagcagcggccttcccctcgctttccgcaaacgtggacgcgaacccgtcgtgaagcctcctcctcctcatccaatccacctcccccctctctttcccaatccccactgctgcttccgtccgcttccgattccaagtttccaactccctccattgctcgcctcgccgcgccgcgcgctacctaaaccccgcggcgaggctttagggtagatgcgagaggaggccgcgtggacggcggcgcgcatcatcagcgcgtgatggggaacacgtgcggcgtcacgcttagatccaagtacttcgccagcttccgcggcgcgtcgcagcggcatgatgaggcggggtacgcgcccgtcgccaccagcgccgccgccgccgccgccgccgatgagccggccgggaagaaggccccgcgcggttctgcggcggcggcggacgcgccgcacgccgcgtccatgaagcgcggggcgcccgcgcccgcggagctgacggccaacgtgctcgggcacccgaccccgagcctgagcgagcactacgcgctcgggcgcaagctcgggcaggggcagttcggcaccacctacctctgcaccgacctcgccaccggggtggactacgcctgcaagtccatagccaagcggaagctcatcaccaaggaggacgtcgaggacgtccgccgcgagatccagatcatgcaccacctcgcgggccaccggaacgtcgtcgccatcaagggcgcctacgaggacccgcagtacgttcacattgtgatggagctctgcgccgggggcgagctgttcgaccgcatcatcgagcgcgggcaattcagcgagcgcaaagcggccgagctcacgcgaatcatcgttggtgtcatcgaggcgtgccactcgctcggggttatccatagggatctcaagcccgagaacttcttgctggcgaataaagacgacgatttgtcgctcaaggccatcgatttcggcttgtctgtgttcttcaagcctggtgagtcacccctgctgttagaaactcaattatttatttctgtgactgttgcgcttgctccatcactttctgagcaatcgttgatggtaatagtccaatagatggaatggtttggttggtggaattaatgatacatagttgctttagctcatctgactagagaatgtatggaaattaagatttgagaatagagaataggaatatagtttagtcgtttaaaatcatttcattcattcattgggactcaacatatactgatccaatctgataattagatgttaacatttacgcatcagatggtgaaggctgctcttggtctggggttctctcttttttgggtacaattgttgttcgtaaatgagattgctagcaaaatatgggtttttgcattcatttaaaaagtttatgaatactaaagaaaaatagttaaacttacagtttttcaaaaaagataaattaattatgggacaaatatgtgaagatcgatttctgaattgtttcctgctgctggtggatgaataataaaaagaaaagaagaagaaattgattgtttggtgctttgctgtacagactacagcaataggaacaatcaaaatcgaacctgtctttgtacacttatttgaatctaaatatatgttattcaccgatatactgatttgaccacttctaaaagggctaaaactaactgtttcattgcaactaatagaagctactttacatatagctaaaagtaccatctatcgcgaaatccacttcctatgaatctctcttctataaatctatttaccatttatgtgcatcttatgcagcatttactgtattaatttttcagtgtaattagttatcttataaagaaattccgtttgttgtttactattcttaggtcaagtttttactgatgttgttggaagcccatactacgtggccccagaagtgttgcgtaaatgctacggaccagaagctgatgtttggacagctggtgtgattctttacatactattaagtggtgtaccgccattttgggcaggtatatatttactcctttattatcataaattgacttggaaattcaaaccttgtgttttcactcgtctaagctgacctgtactatatttaatgcagagacgcagcaagggatatttgatgcagtgttaaaaggtgtaattgattttgattccgatccctggcctgtgatttctgatagtgcaaaggatcttataagaagaatgttgaatcctcgccccaaggagcgcctaacagctcatgaagttttatgttagttattttcaccattactctagttcttttcttcaataactcagtatgttttggtgtgtgtattgttctgaaatgtgccctctatggtgcaaatatttagttttgtaacagtatatggtaactacttatgcacagctgttggacaaagatgttaaagaattattttcatacctgaccaggtcatccgtggatttgtgaccatggagtcgctcctgatcgacctcttgatcctgctgtactttctcgcattaagcagttttcagcaatgaataagttaaagaagatggctttgcgagtgagtacattcttttccttttggcaattctaaagttactgtggtagctatcatagtacttcacctttcacaagcaatttgaagtcatcctccattgttgtttgctggctagagtgtccgttaccttgtcttgttccttttgattgttttttttttcagaattgcttcctgtctttattatctgaattttcttttgtgggctagtttttatactctattacatgaccagtacttatgggggcacatttgctaagttttatgctgactgacggtttgtcctgccaggtaattgctgaaagcctttcagaggaggagattgcaggattgaaggaaatgttcaaggcaatggacacagataatagtggtgcaattacatatgatgaactcaaagaaggcatgagaaaatatggctcaacactaaaggatactgagattcgtgatcttatggaggcggtaagttggtgaaatctattaaaattaacatttatgattgctagcttaaggatccttcctgcatgtttttagatattttatgatccagattgcttctttctgaacagaaagagcactgaaagtctgccacctggttccttgcactgttgcacatgtacacaaaagccaagttttatgatcagtgacccatgctttttcttcattgaattaaaacatcattgattgcagaaactgaatgccatggatgtgtctccttagtgtctagtatatggtttgcatcttaggcagaactgttgtctgtgtgaccgtgtgagtgaaattagacaaactatctctattaaactaatctactgtatttcaccgattatttgaagttgagtcatatttttgtcttctctgattgccatgtgatttcatttccaaaccacaagaaaacatttttttttaggctttcttcagctagaacttattttcaatttttgtgaatactcaaaaggtttacatatctgtactgtgcattaagaagaagtaaacaaggtttacaaagaaagctttcactcaactaactaggggcgaacaaaaacaggacaaacacagaaaggttatttttatttcagtgagcatatgcttatgtggcagtaaatgcttataacttcatctcggttttttatttttgtgtgcccctgttgttttaatttacagtctcccttatgtaacgggtgtatgttttatggtgtagagtttattattccttggaaaactgaactgtgggcttacatatttatttttgtttgaataactttaggcggatgtggacaacagtggaaccattgattatatagaattcattgctgctactctgcatctcaataaactagagcgagaggaacatctagtggcagccttttcttatttcgacaaagatggcagtggttatattacggtggatgagcttcagcaagcttgcaaagagcataacatgccagatgcttttctcgatgacgtcattaaagaagctgatcaggataatgtaagcatgttgccccattagtttgttatagctaacacatgcaggaaggatatacaaatatttattaatgagtaaagtgcacgggcggtccttaaacttgcaggggtgtgtcatctaggtccctaaactctcaaaatacatacaagtccaagaacttgtcatagtgtgtcatttaggtcccaaatcgccctagcccctataggatcttacgtggcactgatgtggcatgccacacggacaagacgtggcatcattttgactaacaaatgaaacccatttatctttttcttcttttcttatcttttcctcctcttttttttctttcttctcctttttttttcttttcccgagtagaagaaaggaaaaaaaagaagaatgagaagaaaacgaagaaaaaagaagggagaaagaagaaaaggacatatcacgtccatatggcatgccatatcagcgtcacataggattctataggggctatgtcgatttgggacctaaatgatacactttgacaagttctgggacctagatgtgcattttgagagtttggggacctagatgacacaaccttacaagtttaaggaccgcctatgcactttactctttattaataatctgtttaaggaactttaaaagatttcacttgtcaaagcttgtcatggaacaaaactgcattagtactgtttcacaaaaaaaaaacaatttaaccatacataaaaacaaaagcagcactaaatctaagaaaaattaacgagatatagccatacctcacatatcaactgaatattacaaccaattgacctcttccacaacattaaagttggggtagatagtggaaatatagaaaatacatatggtcttgattttcctaacagattggatatatgtggtgaaatggaggtagtaataatttcatgggaatcactagggatatatctgcaggacatgacatgtcaggttatgctttcctagtgatatactgtggtgtacgaaacttgaacattcattttgtagaacatgtgaattgctgaacccattgctgtttgtgttgtttcttcaatacatatcgtccaaatgttcgtggttgaatgtctattgatatggtttactagttactgcgcttagaagaaaatatcttttatgtagcagtgatctaattgcacttatttcactccttttcatcaggatggtcgcattgactacggggaattcgttgccatgatgacaaagggcaatatgggtgttgggaggagaacaatgagaaacagcttgaatataagcatgagatgagacgcacctggtgcactatgaagtctgaacgtccacagtgcagctttgaaacttcttcaatctccatgctctatacggacactgcctgcaatttttgtacgctgtcagttgtagccttgtaggtgtgggtatgtgtttcaggttcaggggattctaattgttcatctaattcaacagtcggtatgtgtttcaggttcagggaattctaattgttcatctaattcaactgctcctgttatttctacgaaatgcacggggtgggaaagtgcccatgccatgcgcaaactaggctacaatgttcatatacgttgccacagggcctaatttctgcagttcgtcacacctgagtttcctctgtgtttttcttattacatgaagaacacctgagtttcctcttctttcctacacgataaaacgcacaacacggcacatgtacacatgttatgggccgagaggcccagaccaaggcagcctggcatgacatcggcccgagaggcagtaccggtcgaaggaacggtggcctcacggtacgtaaggaaggatcgtatcagaaagtgagtgtcgctttaactaatcaggatccttatctatgcgagttcaagttttaaacttaacatgggtattcgtatttatgactaatttttttagtgataggtaacatactcatcaacaacgaaatgcttgtggtgtggtgtatgaattagacatgtaacatctatacattaattacgcctacgactgtgagcattagcaaaagttccttaaaaatattttttagatttaagattcagtggaatcgttggtaatgctctaaggctgtgtttagactcaaagtttggatccaaacttcagtactttttcatcacatcaacatgtcatacacacacaacttttcagtcacatcatcttcaatttcaaccaaaatctaaactttgtgttgaactaaacacagcctaaacccttaaataaacgtttagggcccctttgaatcgtaggaatgaaaaaacagaggaataggaaaaacacaggattctgacaggaatacaattgtaaaacagaggattgcaaaacacaggaaaaacacaggaatggccgtttgattggaccacaggaaaaacgcaggaatcagatgagagagatagactcagaggaaatgttccaagaggttagacctcttgctaactttcctccaaaatgtgcataggattactcattccataggaattttaaaggattggataggattcaatcctttgtctcaaaggccttcataggatttttttccataggattgaaatcctccaaaattcctacatttttcctacaaatcaaaggggcccttaagagacgaaaactcgggatcccggagggacttgctgttgccctgttgctgagttgttgctgtgcacgatgccggcctgcgtgctttcagaattcagattgctccacgcaggcccatcgaagcttctttaattagcgtgcaacggctcgacttgaggaagagatgagaaagaagggattaccggattacgacgtggtggtcagtcggccggccggccgaggcagatgagagatggatcagtgcacggtgatgtactaccaatatgtaccgcacgcgcgccgccgctgtcccccaatctcgtcgacgtcgagacgtggggatgctggagctagctatcaacgccaacggacgcgtgcctgaatgccttgatgcggtagcctgagtaagctcgccggctcgccccgtagtggacgggctggcttgcggctgcaacttgcaaatcatggcatggccacaggggtcaagggcccaacgcacagtcgtctcgtccgcccccgggtttctggctcatatatgccacaatctgtggacaaaccgaacaaactccaccaatgcatcatcccctctcgtttcagcgtcgtcgccaacgaacacccaccggtaatgcgccctcctcagcagtcgcgccaaccgccacgaacgccgcgagcgtccctctctctctctcccactgctccacacgcgcgcggcgcgcccacgcatccatccatccactgcacacaacatacacgcaaatggcgcccgcggcgtacgttgaccccggctgcgtccaccgtccaacttggccatcggaccccgtcgccactcgtgtgcactttggttgaaaaatacgcggtgcagctcaacacgcccctatcagcggatcgcccccccccccccccccccccccccggttgactccactccacatgcagcgcagcttatagttaaccggggccagcgcggcaacatctgcacttgtctccctccgtgacctcaataatacgcgcgttccatctccatcaggatcagggagggagatatgagatatcgttaacaaatttctcgatcggtagtgctcacgtcaaagccttcagtcgctcagtcggttgagtgagtggttcagggcttgctacttgcttcctagtgtagctagcttgacttgatgcgccacagcactaagccggaggaagaatcccagcaagcatttgcacgaatcatctctgacagtgaagcttccattccgatttccggtgtcatcttcttgaaagtaaattttccacgtgtgatcttacctttgctttcgttttccacctgtccatttcgatcgttatcaggatgtactttaccccttgtgcgaggaagcatccgaccgtattgggggaggcaacaagatttcattcttaatgccatcagacagagactagaattctctgagatgtattttatggttatactatcagataagaggtcggctggaaaaagcgccaagaacagcgtgcaatgaagagacgatcaaacaaagagatttcaactattttattgcaaaggaaagagcttgatttgtgagcttgtggttggccatggtgccagggaagcccacctcacctgcagcctaaccaacgccactaattcgtgaacgggaaatctatccaatccataatacagaaggtgcacattctcatcttatcttttgcattaaacaatattactgatttgacttacgatcaggagaaggtgctcagatattggttgaccaaactactgctgcaagtgcttgagtttgtgtcattgtgtggctattttgtattttgcttgctgggacactttgctctttcagcgactaaactactgacatgtgcattaggaaatcaaggtatttgcaattcattttacatgcgtttgtttcgccgggccgcttcaaccaatcatgaatcttggaggggatgtggaattgtgagtgcgccagtgaccggctctttcggatccaagagctgatagagcctcagagcgggactcatcctctgcatcagtttccactttggcatagtcttaggacctgtttagatgggactaactatcacatcggatgtttggacactaattataaatattaaacgtagactattaataaaacccatccataatcttggactaattcgcgagacaaatctattgagcctaattaatccatgattagcatatgtgatgctacagtaaacattctctaattatggattaattaggcttaaaaaatttgtctcgcgaaatagctttcatttatgtaattagttttgtaagtagtctatatttaatactctaaattagtgtctaaataaagggactaaagttaagtccttggatccaaacaccaccttactccctacatttgatgttaaacacagttacaagttactctctccatactcataaatgaagtcattttggacagcgacacgatctccaaaacataactttgacttcttgtttctataaaaatatttattaaaaagtgatatatgtatacttttccttgagtccatcctctctgagggccacctttggtctttagctggtatagctatttttggggttctcctgggaaggtagtggctctgtccccttccagctatttggagttgtgtgtaaccgtcacagtagtttttcgtctcttctttattttagtcttttttcctcctttcttggcataagtcggtctgactgattgcgtcgtgtgacaaacattctattcttctaatatattgacgtgcaatccttttgcgcgttcgagaaaaaaatatatgtatacttttatgaaaatatattttaagacaaatatattcatataatttttacattttcaaactcaacaacttgagagttattcatgatttatattcccaaggtttgacttaaacattgtcctaaacgacttcctttatgagtacgaagagagtattaattaatcattccatgtcaaggcatatgcttatccttaagatcctccaaaaggtggtaaacaacagtgcaagagtcgaaacatggctcttcaagtcttcattgtctctgcctctccgaaaatgcttttttgcttattgcccttaaaaagtgtattattttgtttactcgttattatgcaatcttttttttttcaattcgatcctacaagaatggccaggtatcctagtgggccataacaacactcacgattctggatttttttaaaacctttctaaatttaatttttaaaaataaacccatcgaaagctcatttctagatctgaacctatttacaacaccaatttaattagcatggcaagaaaacattatcatctcggtgaaaaatcatggactggcaaatatttctccatgctactcgcgatggcatgacactactgttgtcaatgttgccttgcaacgctacctctagtagtgtggtcaaaaagcttgttttttttaaaaaaaaagttttggaactttaaatttaaaaatattcaaaaaaaactgtgattctgtaatcctgctataataattggacaaattttatgaagatcaactaagaaagcacatagtaattattttctttccgtagcacttctcaacgtaattttaacacacaactaatttcgaacaaacacacactcggctacttgagcaaccgaaataactagggatcttcacaaaggctttttctaaaagtgaaaagcacagatcttacaaataactgctaaattgtctcatggtcccatgtgctcattgttatggacatttttcgaaatgaaaattgcacatgaagtcatgaagcattgcaggccaaaacaaaagtgttaccagcagtaccaaatttggattcaacatcgcagttaaagataactgcgtataaaattccaatatatgtgcaaataagttacagcaatttttcacacatttccccccaacaaatcggtgcttacatacatcctggtagctgatgctaccaaatgctcaccattgctagctagtcacactactcactggtactcacaggcaaaacctaaaaaagaatggaatctacaaggctaaatgaaaaccaagaaaagggaagaaagaaaagaaatcaatagagattaaccaatgaggttgcacactggttaatgtctgtctaatgatgtcttctttttttcccatcttggttaaagaccagacagacgcagagttagtgcgcatgccactacgccaactctggcccctcggcgtcgcaggccggcgccttccagtaattcaagagcagcgcgccgatgccgcggccgccggagcgcgcgccgcagcggccgcaccgctcgccggggggcatctcggcggcgacgagcacgcggcggcacgacgggcacgacgagtgcgcgcgcagccacgtgtcgatgcaggcggcgtggaagcggtggtcgcactgcggcagcacgcgcacggcctgcccgtcctcgaactccacgaggcagatggcgcactcctccgcctcgccgccgccgccgtcggagacgtacgtcacggtcgggagcgaccgcagcacctccttcttgacgcccttgttcgccgcggcggcgccaccgccgccgccgccagccgctgtcccgccgccggcggcccgcgcccagcggcgcgtgcacgcgcaccgggcgacgaggccgaggccgaggacgcagatgagcgcgcagagcagcccggcgaggatgacgacgaggtccgagttgagtgagtcctccaccgagccggaggcggccgcctcaaggagcattctcgccatggctggcacaccaggagatcgatcgaatcgaagaaaaatggcgtgatcaagcgagccgcgagctagctaagctgccgagcagtgtgggagattgagcagcgcgagaggcgtgtgaggtagtgtaggatggggttggtttgcttgctttatatagagctcccgcgggcagttgcttggcgacttttggtctttgaaaaaatggatggaattccggggaaaaaaaacaaaggcataagtcacttgagacttgagaaaatgagagtagtaggacctctgctttgggctcccacactttggcggaagagggttttaagtgggactgataatgctctctttcgatagtactactgtatatctcaagtcacaaacaaattaagcggaaataccttctgtccgaataaaccaaacgacatatttacgaacggaaagtaatttgtaaataaaatttttttagcgatctaaaagtaaaggctaaaaaaataaactttaatgaaaaaaccctaaaatcagctttaaatttaagtttaaaaatttaaattttggctgataattataagcataaacgaaaagatgaagctattctactcttgctgcaccataaatacaattttctttttagaaataagcacaagggtagaactaagagaaagttctacatttcagatacaatacaattagcaccggtgcaattgcgcagggaactactatagtataattgtgttttgctataggcaatagtaaaatagcagcatacatcgacttctccaatgtgctaggtcaaacaaattaaggaaaagcccattttacaacttgaaattccacgaagtttgaaatcgagccttaactttgaagccatatactcctatttaatttcaacttttaaaccatccaatttcagcctactcagaacaaaactagttttgaatttaaaattgtataaaaaaaaaccagtttcataagacagatctgcaacctacatcacttggtgcaagactgcaagcggaccacgtagccacgttagtgacgtatcattcaaagccactctaaaataggtacaaggttgaaatgaacagcctcttagaacattaaaagtttttttttcgcgaacgcgtaaaaggattgcacgttaatatattagaagaaaaatagttttatttatacgacacagtcagccagaccaacttatgctagggggagggagaaaaagcaaatgaaaaaagttgaagcttagagaaactacgacggctagaaacagaccccgagtagcgggaatgggccaaaccacgctacactcccaacaaatccctaaaagtgacgacgccagctaaaaatcacacatggcccttctaatggatgaacttcagaaccactgagatggttaaaagctgatagtacacggttttaaatctcagaatcgagatttagactaacattgatttatggttgttaaaaagaaacttcctcatagaggaatgccacgaactaaagccttgattagacacaaaaatacattctaaatatttcacttgtctcgtgagtgagcagcataatagcatacacccaactctcaagggttccagggaaagatttatgcgattggcactataatccttagtagtagcacccacaacacaacccagagagtggaacacttttttttggtagcaaaaggttgcgagcaagggacagatgtccgagccaggagccacacgaaacaatcctggtacagatactttcggcgtttctctcgctacatctacatgtgtcacgctgccacagcctacatgttctctcatgcgtgcaggcaaccagcttttcccgtttatgctagtggtggtcacgcttgggcatttcccttccctcaccaccgttctttttttctcttttacatggcgtgtgtgcaaaactgtgcatggccgccgcgacccgagacgggaaacacgcccagaggacgcacattctccccctcacagaaagcgcgcagaaacgcttgccgggttgccgctccaaatttgcgacgtggggctcgttcgatatggcttgagcctagccgaacaatttcggcttcatcttatttgcgacgtgttgtaccggtgcgagatgcggaaaggaacaccggtgactactggtgatgagccgtgagatattcgaaagacgatgcgatcttgctctcgccgaggacggcttgccgagagaatttctcgcctttcagtagcctccatgctgcggaagtacgtatagtcccttttttgttgtagtggtgcgagagcccaaaagcagccacttcgcacatggcagcggcgcctttccgcagcacatatcactatatcacatggggggcgaaccaagcgtaactgaacggtaggttacacgagatgtacgaatacgacccagcggtaagcagctatgcacgcacggctgcagctcgacgtgcaggtttgcatgttgtatcttgtatatgctatgttgctatgcacgatgggagtgtgtttcatgtttgatcgatgtgtcgaggtaatagcgaatcggtgatttgggggtggatgccacttttcaagcctaagctaggcactgagccacacacgatgtgtagccgccttagggtgggctttttggagtgtgatcaaaagctagcacagcgccacctttctctcggatcagcgtgacggttgttgtggacgagaaacagagagccacgaaactacacaggtgcgacacaacagaaagatttttcacctgaagcaccaaattacacttttagaccgagtaaaactgggcacttccttttagtaaggtaagccgaattgtataatagcatatagaaatacaattaggaaataaccgaaagtcagaattaaaaataagaaatattagaagtagagtatagagtctatatagaaatacaattaagaaaaaaatagaaatttggaattaaaaaataaggaatattagaagtagagtagagttcatattgaaatttaaaaccaactaaaattcggaataaaaaggagcctccacgttcgctctcatggcttagaaattctcacattaatcagagaaaaagaaaagagcagagtccatatagaaatacaatttagaaatagctgaaattcagaattaaaaaataaggaatattagaagaggagactagagtagttattacacattagtagttttgaaaagtcattgcaaaatttaaaattatgtcgtcattgtaatatattttaataatataatgagaaaacatatatgctattatataagagaaaatataatgatgctagccgcgcaatctgcgcggaccaccatgctagttgttagtaacgtactaagataaaaagctatgctgatcgaatcatctgaaaaataaatggtcgcatatgaaggagataatatcttcaccttaaactattgtcaacagtgaaatttgaattatcacatcgccaatagtcggattcttgctatattcggttaaggaaattaatctattaaacaaagcttatcaaggaggatacggcatgacaagttatctattaattaataatagtttattagtttccttttatctctaggaaaatatgtttagtgtcctataaggactttatgtattccttttatctttaggaaagtttctttcttgtactacaaggactgtatctccccatgggtataaatatgtacacccggggtcattgtaagatctctctcacgatcaatacaattcggcgcatcgccaccttttgtcttttctactttattttatcgtccgacaggacttagcacctgacgctgggctgcatcggttttgatctccggcgaaggggtaaatccaatattccaccggcccaggcaatcgtatctacgtcggtgttgttcaaggctacatcagtacattcgacctcttggattactctggtttggttgatatatttgcctggttatttatcatatgtcttagttaatctagtcttagtatctcaatttagctatatcggttgtctctcgctttaggcggaactctatcagttgtctctcgctttagggtttccgtcggtatcggctaaattgttttactagattagattagctaaggcatctatcaccctgaaaattagtcaagggctcgattgtctagatattatgtttcttttcataattagtgatgcatcagttaagtttgatctaccaagttgtgcttagaaccataatctctagcctgcttgttgactgccaataagggtttcctcggggtttcagccgatgaattatctggacgttgcattggcttacaaggattgcatataagttggatttagccgataataacaaaggctttactgtttaatctaatctcgtggattttatggcatcggacctccagctgatgtatgctttaaccttcggatcagtgctcattctatcatattattgctagccaactggtttctactggatattattattgttatattatatcattatcagtcgatcgcctttatttatatcaagtgtcagattctacatcaaacacataaccgatagctcaaaaccctatcgctatcggctaatatcgacatcggctagaactactctatcggcttgtcagccgatcgacaatttgatctactattttcataccttgtcagttgcaggatcaaactgactagcacgcctgcacctcaccaagatttggacctgcactagagctaagcagatctcccaagccagcgtatgtttttcacgtcaacaactatacaaaggaaaaatatgcaattttcaaacttgaactgttgaactcatggttaacctttaattataaactttcacgtgatgcatatttgcccctagagaccaaaaccacctttgttttcacctcaaaacctcctcagggcaacaacaatgtatatagcaaaagtagtccatatagatgggacccacatatatagactttaactattgtaacattcccaatgtatacagatagcaaatagtattaggaggagagaagaaatagagacaaataatatattttatgctctatgggcagcccatatgcttatggttagcttttgttatttctttgctatggactagttccacaatgttactagctagttgaatgaaatattatattgcatatgaatgaccacttttgaactctattgtggatgcccttacatcctccaatagcggacaaactaactctaaactaagtggcgcatatttttttttcttttcctatgattaataatgataattcacgtagaattagatttaatatacaaccctgaaaatttatttctattagcaaaatacccatgtgttgctatgggtaaaagaaaatacattataatatgtcatagagatttttttttatcaaatatgttagtaccacttatttacttatttaaatatatggtgtttacttgtttgaaacacacactggactattccatgatataaaacttatacaagttataggagtggtggagtggcaatggcagattcactgctgccaccactagtgttttttaaaggagtatatataggtaccattacatgtagaagtatatttagattttgtatacaactcttaacttctatttatataggtttagttctcatatataactcttaacttatagaaatctatttctatagttataattgtattttgtatgccgttacaattcaaacccatcatgatataacagttaagatcttttttctccgattaatgtgagaatttctaacctttatagctaacatggtgtctcatttcaaagttgtcttgataatataataaatagattactaggtcttcaaaaaagcggagaaaaatgacaatatgccactccattcggtgggtctcgacaaaatgccaccaactacaatacaaagaataaaatgccacttaataggttactttcaggacgttttgtcactttggaggattttaagaccaaaatacccttggatgtggataaagaggaagagggaggagcggggaaggttgagcccgacggagctcatgcttccccgcagcgagcgcggggcgttagctgcgacgacggacggggggaggaagacaacgacgctgatgggaggaggaagacaacgacgctgatgggagagacgacggcgatgatgggtggcgaaggacggcgactgggggatgagggcggcgccgatgggagggaggaggaggcgacgacggcacagagggctctccagcgctgcccacccacgcgcttgtagcttgccgcctccgacaccgcccgcgcgcgtgctccatgcttgctgcttctggcgccacctgcgcacgcgctcactgctcgcctccttcggcaccgcccgctgctcgcggcaccaccgtcctcctccccatcgtcgtccgtccgcacgccctcaccacccatcgctaacgagcacagacgccgccgtctcgatgttccctggtgctccccctcccttctctcttcctctcttcccagggtattttggtcttaaaatcttccaaaggggccaaatatcccgaaaataactcagtgagtggtatttcatcctttacattctagtgggtggcatttcgtcgaaatccaccgaatggagtggcatattatcctttttctccttcaaagcgaaggtggtctcatttttagctatacttagagtaaattttattttgcgcgaccttttattacccgatatttcattttggaccaccctttaacataggttttcactttggaccaggtaatcttccctttgttccactttagaccaccccaaccctcttttccatcatataaacaattccgagtacaccggcttcctactcgtcaatgaatacccacggttacatctagactattgctttgacatatgacaagttgatgcatatagataaaatagttgagggtagtccaaagtgccataaatgtaaattttcccggttcaaaatgaaatatttgtttggtttgaagtgaaacaatgttaataaaaggtgacccaaaataaaatttagtcctatattataaatactagtgagcgagcacgtggaagacacattgatagatataattgagaaaaaatacggttattgttgcttatttactgatacattattaaagaatcatagtaggaactaagtaaaaaataatattattgtaagcaatacattgttaattcatgaaataaaccttaattgtttattttgttacatgacaaccaaatgcaaaaaagaaaatggaatatttatttgtcatcatcgatttcacgctcactttaagatcagtccctcttaggagatgaggtagtgtcagtgtcgctcggttgtagattgattgccctgcatcttagggcaatcttcacctgattgtggaggaagatatcgtttattaggtcttctcgaacatctggatgcacatgtatataatatgatgcatttagtattatgttagttgctacattgaagcagcagaaatgaaatacgttatgtacctagaagaggaccgtacatcccactgtctggccatagcgcaaccggtaatggttgtattggtcgtactaaccagactttctgaaaatcaggtatagactttctgaaaatcaagtatagatgatctatgaagcattttataaatgacatatatttattctataaaatgcttcatagatcatctatacgcgattttcagaaagtctggtccgtacgaccaatacaaccattaccgttgcgctatggccagacagtgggatgtacggtcctcttctaggtacataacgtatttcatttctgctgcttcaatgtatgaactaacataatacttaatgcatcatattatacacatgtgcatccaaatgttcgagaagacataataaacgatatcttactccacgatcaggtgaagtttgccttaagatgcagagcaatcaatctacaaccgagcgacactgacactacctcatctcctgagagagactgatatgaaaatgaacgtgaaatcgatgatgacaaataaatattctatttttcggcatttggttgttatgtaataaataaacaattaatgtttatttcataaattaccaatgtattgcttacaataatgttattttttatttggttcctactatgattatttaataatgtatcagtaaatgctcaacaataaccgtattttttttctcaattctatctatcaacgtgcattgcacatgcacgctcactagtaattatagcttaagacagttttcttatggcaaaatttactaaaggacacttcaaaattgtgtaattagctgtgggacatccgaaagatgtaaatttgtccgaggacactctaaaagtgtggtaatttgctgcaggacattgggcatattaaaatataatatccactgaattgatgagagagaaaccacgtaaaatgattgttttgccccttctcttcttccccttcgtcttccccaacactagctgcctagcgccattgccgatttccgcttcctcggtgagccccgcatcgattccttgcacctatagcctccctaggatctctttaactcgttgggcatacatgcatggcagtccattgaaggaatcaagccgtcgccgttcaccatgctcagcgtcctcgtcatcgcccacaccgccgcccatgtcgctgcaagagacgacatcgaggtcgtcgctcccggaccggctcatctcgttctccactgccacgccctcctcctccccgccgctcggctgctggtgcggtggtgactgattgggtggttgtggggtgcaggcgatacgggcaaaggatctgaacgagatgttcccggtggccaacgcggaggtggcgccgatgttgaacccgcgagggttcgcgaacctgctgtggaagcagctcaaccacctcggtaacaccgggttcgacctggcgctgttccgcgtcaacgcctacagcaacatgctctacctccatgccgactccacctcgcctctcacgtaagacatcgaccactggttcccctgtgcccgtaagaaacacagaaattgaacgaactcatcccaagatccgcttcgagatcattcattcgtagatagggctgagggcaattttgtcgttttgaaatttctctcccatctttttatcagaaataataaaatattgtctcgggtgtcctacagcaaattacatgaattttgtggtatccatcagcaacgacacaattttacagtgtctcacaaccaattacacaatttttgggtgtcccagggcaaattttgccttttcttatatgtcgtctccataaaccccatctttgaattgctgcatgaatcatacgcatttggagctaaaaacgagttgaacacaaatagtaaaatgttttttttcaaagaactttaacaaaagacatatttctcacgccaaaaccgttataagtcttttcttttggcatgctctcttattacctgcatcgtcataaatcttatataatcaaaggatatatatagctgatgccatgtaatttcagatggctggaactgcaaccgtctggcatggcctctactctcttcgaacaccttgcggttcaccttgggtacgtactaatgtactatagtgatctttccactccttgatagttggattacgtttccggctgctaattaaagtcgtgcattcagtcgtgcataccgcacacaaattgttacatcaagattcaagacccaccaagatttatgcgacgggacctatcacggtatcacctttcacattgtaggctggatacgctgatttcaggtcagattccgcttgataggcacatcacaggatggcacacaccagccgccagaaaaaaaagctttgcacgagcttaaagcgccaacatggaaacgtggttgctctcaggacacaaacagttaaagtgtttcctgatcccaagtaaaaagacggccgagaagataccatttcacgtggttgctcttaggacacaaatagttactgaagctaagtaaattgatcgactcctatttcacgttcgagacccaaaagaacaagaaaaatattggagtatgagtgaaatacagacttaagcttttggtgaaatggtttgtgcgctatctcacaaattgcactggctggtttaatcatggatggaggaccaaatctgaaggaacacttgaagcatgggacgaccctgccttttcagggtgcagatagaatcgaaacatgtgcaaaacgagcttttggaaaagaagatgctaataagcgcatcgaatcgaaggtgattatgactttaaaaaagggcgccagaatcaaacatgacgaagtatctaggataaagaccctggttttctgataagataagatccgtctaatacagtactaagtgactggtactgatggcaatttttgtttggttctctccaaattggagttactactacctaaagaagagaacgcaccagtaaaaactaaaaagacagtcgagcagaaggctctttgcatctgtaataccaccctccttaagaggatacaactcggtaccgatctgcgataaactgccttctctttccatggggcaaacggcagagtgctgataaaggagtatgcatatgagggctaggccattctttacataaacaaggagaaaagtgatagggctattggttcaagtatctcaggcttcctttgaatagaggtttttgcaggcatttcgagggtgtatctaaaaatctgtcgcaagtttattgcgtaaaatttttcaaatgtaagtatagtacaattttagtgtaattacattgcaactatactaaagttacagtgtaatacatgtaactaatgaaaagcatgcatatctcagctgttaaggagtgcttggtgcgaagcagggaccctgagttcgatccaccggacccacagcgcgccttcacgaatctccgtgcacatcagatggccagaaaatcagaagttgccccaaaataaaactgttggaagtttttttagcgaaaccgttccaaaaggacagggagagactttagacaaaggcatgcacaagtgtacaacgccaaccaacaaataagacggctcatcgcaccttttagtaatgtgaatgacagaatgagagaagaaaggtagataagagagacgaggagaaggagactggccctatagatggacaggttcaggcaaccaagcattagagcattgggggaatccccccgtatctattaacaaataatttcagtctgctaaaatgagagaaaaacgggcacctaaacattatgctgtactgtgtttttgcaaacttgcaacagctgggatacgtaccaatgttcagatgccaagtattcttgccatggtcatgcagctgtgtttcttgcagtgcttttcgcgcagatgaaacttctaccagtttatgcaatttaaaatcgcatatttgcatggctgcagttccagatcaacaaacatgttagaactaaaacaaaaaggagataagaactatgaataatcaaagggataccagaaagcagcctgcacctttcccaatgttatgttccgaaagatacacaatattactgaaggtaggggtgctaatgggtggaaatccaatccattactgccccaacccacttctgtaacaagcatccttccaattcaacccagaccacttctccttcttcaagccccaaaccaatccaacccataaaaagttttgaaccaaacgagtccaacccattctagttaagtgggttcaaccaattctaaatccatggactgaaaccgcagtgtccaatccttggttcaactctcttcacgcacgtacatacatatacatgcatgcgcatatacatgcgtgtatactaccaatatacacatgttccatgcatggatgcatatatccactttagtatcacagaaactttagtatcacagaagctgtggttgcagcgcccagccgaccaccggcgccgccacagagaactccggccacatgggagcacctcctccggccagtggcggagccagaaattatacaagactaggcctaaggtagggctcgactaatggagtattagttttatgaaaaaattacatggtgaatcaacaaaatttaagcaagtttttggaggcaggccgccctaggcctgcctccgcccctacctccggccgccagcttccatgtctccacatttttgctgctgtctccacagagcagaggtgacgacgtcgtcatcgttagtgccaatgatccgctgccccatctggggctaaggccatggaggccgacagctaccagccacctcgtctgcagcgccgctggtgacatggtggcccagaccaggcaggccaaggttgaggttgaaacccatgccaacgcacccctccagcagcggtgccgcaccgagcacgaacagcgagtcagagcagctggcccacatgctgggcagaggtcgccggcggcggcggcaggatgatgatgatgagccggtggtgatctcgccgccatgctcctgccagcggttgcaacgagtagtgacacagaagggtgtgggaggcagagaggaaggtggcaagccaccggcggcgtcaagcgaagtggtggtggtgccgtggctgtcaatgtcataggaagacgaatgtgatttggggacaatccagtggaagcccatgggctgaatccactttctacccaaactttcctaaccaaaaccaatccaatccaaaccgttttacatctccatccaacccaccccagcccattagctgcatcaatccatttcaacccatccaaagccaacccacactgaaatccaatccattaaatccattaggatccaatccatgagcaggcctaactgaaggcatcaaagttggcaaagttgatgatgtagtagcccctttttccctgaaacataacagaaatgcatgtaacttcactattacaatgccattattccagtgggtgacagtgtctcatcaattcagactagctatctagtttagtttgctacttgcaaaagagctcctgagtatgacttttttttgagagagagagaagctcccgagtatgactttactcacactggtgttcgggcacgagctccagttaggcagtggcaaactgacaacataatattacaataactgaagtttgtaaaacagaaacaataagaaatgcaagaaaccaaccttcaaagtatttttctctttctgacaattatgctcagaaattgacattttctacagttttatacagtttgcacccccaaaagcatgtctcactggttaagcaatgaaagactgcataagaaaccaaattatcagacacatcatcaggattcaggagaaagaaaaatcaggacatgaataccagttgtacttctcgcacaacattttgggggaaaagaagcatgtgaaactcaaattccaaggtagcatcaaacctgcaattttgtggtaccccccatgacaatgccccaaatctttttaagcttggtggcatagacatataattcctccagtcttccattatgactcttagatcatgaagtttgctctgtaatccaatgcaacagtttgcatgcatagtgcaaaccttgtttaaatctctgctgggttcacaaatgccaccaaagtatgtagtgcttaggaacttaattttcagtccaatatctgtaatgtaaggatcatgctttataaaattaaatacatcctgatcatgatagccaggatatctcagtcgcgaagaataccaaaacttgtagaattctatactttgattgtttgacctcacatagttaaatcccccgtttgctatgttccccaaatcagttgcattgcctacatagtgatcacatgcaatctgaaaatctccatcaggatagaaatgaggaaaaggattgcggaaccacgtgatgtctgcatcctgaaatgcagataaaaaatatgtcaggtgtgactaataagaaactctatttcagcttcacatctgctaatttttcaggaaaatatacagccctatgtgcgtataaaagctgattttcaatatagataggacacactcaaaatgcaattgactttaccgagaaaatgaagctgtaacctttttcaagaactagccgcaagaaatccagccttttccacatcatgtccagataaccagcagtcagaaacctcttctcttgagaaaaatccacattctcggttgcaagagcaaagcagtatgcgtggatcttcatacaccttttgtaagccttccaatcaaatgttattatcacaagatgtctcaaaagtgagctagtcctaacaccacggcgaaaactgtcgataaaaagatcaatgaccgagcctgaagaagcccatgcagcattcagtgttgtcaatataatggtcttattatccatggaggcctcctgcagaacttgctcaagtttgaggtcgtcactgtcctaaaagaaaatgcaataagccaataatcaaaatgcaggtctattagctctacttgatctgatgatctctcgaattcaatgacatatcagacagcagtgaaattggaagaaattgcatccgcaaaggaaagcagcaatatactatggcttattgttcacgaatctattagttttcagattttaatgggagaacaaattattggatgctatgtatgataagcattcattgcagaattgatatgacgaacagcatgaaattttgacccgtgaaacaaatataaggaatcttgacccgtaaatcacaatgacggtcatttgattattgttcattactgcaatgcgtatctgtaagtcatagtcgattgaatcagttaatggagtgtcaaacaggatcgatgactaaaaataacctcaaaagcgaaatgagtagaagtgaggtataaaccacgcgattcactaacaacggcacgcagaaaacctatatatatatatatgctaagcacagcaattcgcacctcagataactagaaccgctacagaaaaactcagggggacaaaattaaacagcagaaacgacggggaggaggaggtggaagcaaagcgcaccagatcgtcggccgcagcgggatcgacgtcgccgtcctcctcggggaccacaacagcagggggcggctggccccgctcccaccacggcccgcgatcccatcccacctgcaccggttggaccgcgtccaacaccgcggcgcggtacagcacggcacagggcagcgccacggccgccgcgagcaggagcgccgccgcggctttccggagagccggcgcggacagcggcagcgacggcttcgagtgcccagggaagtgacggagggaggtggcggacgtccgtgccacggtctggttcggcaacggcctcgccattgcgagagcggcggcggcggcggcggcggatgaccacgacaccgacgcggacacgcggcgcggcgggggacggggaggggaaagtgcaaagcggcagcgtaacggtcggtgaaggcgtaaactcgtggtttccgtaaacgcagcgttaaagcggataccgcctacgggagagagagagaggggatagccgctcgcacgtgaggcggccgcacacgcgggctgccagatgggccaccgcatgcgaggtgtcactcgcgcggtgcaccgctgcaccatcaccgccttccagtctccatgaccgatcgggcccactcttggtcgctctacctggccccacatgtcatccactcgtgctacgcagcagttgagcaatcggtgattaaaaaaaaattccacacccaaaccctagccccgcaccgatccctctccctctcccgccgccaccgcctccgcctccgcctcccctcgcgccgtcgccgtcgccaagagccgccacttccgcttccgcctctgcctcgtccaagtccaagccaactacctaaacctaaaccctattcttcttctttcgcctccgccgcgatgtcgtcggagcctccacccgatgccgccgccgccgccgcctcctccgcgggggatctcgcggccgatctctcctccgccaccatcagcaagaagcagctcaagaaggatgcgaggaaggcggagaaggccgagaaggcgtcgcagcgccagcagcagcagcagccgcaggccgacgccgacgaccccttcgcggccaactacggcgacgtccccgtcgaggagatccagtccaagaccatctccggccgcgtgtggaccgagatcggcggcctcgacgaggccgccgccggccgctccgtcctcatccgcggcgccgcgcaggcgatccggcccgtcagcaagaagatggccttcgttgtgctgcgcgagagcatgagcaccgtccagtgcgtgctcgtcgccagcgccgacgcaggggtcagcacccagatggtgcgcttcgccacctccctcagcaaggaatcaatcgtcgacgtcgagggcgtcgtctccctccccaaggagcccctcaaggccaccacgcagcaggtctgctctctccaccattatgttgggtcaatatgatcatcaattgcatttgcatcaacccttggccgcagttgattagaatatgcattcggatagccctcttgtgatagctctagaatgctgaatatttcatgttagatgatggttctgcaatcgattggaattcacattgtgatagtcctcttatgatacctcttggaggctgaatattcatgtatggtggtttttgttggactttttgtatccatcttaatttaccgtcacaattagctcgatttaatcccgcaacataacttattatacggtgtgcacatttaaaactgtgctttgtttcagttagtactagctaatgaagtgtcttttgtttttgctggcaggtggagattcaggtgaggaagatctattgcatcaatagggcgatccccacccttccaatcaaccttgaggatgcctcacggagtgaggctgaaattgaaaaggctgaacaagtatgtatatgtgcaacttgcttgtacatccacaatgtatatttacaggatgcctataaatattataatcattgtgagacttaagaaattaaccactgctgccgtttcaggctggagagaagctagttcgtgtgggccaagatactcgcttgaactatagagctattgatctccggacacctgcaaatcaagcaatattcagaattcaatgtcaagttgagaacgtgagtatttatttatttatttttactgttatcatttttgtattagtggattgtattgtgccaacgatgctatgtgatctatagctcagttaacacattaaattttccattgaataaaaactactctggcaaatgttcatgctttcagcttagtcaatcttgcagtaataaacatttgcctcttgggaactaagctcaaactttgcacaagttattgctgtttggagatatactgatttggtgaccccaagatgttcccaataatctgtgccttgcaacttatctaattgcacttgtcaagggttagattcaatatgtttgtcttgagtgaaggccatgcgtgtagtatatattcatgtccaagccttatgtaggctaattcttaattcagtggaggttaaacaacgagcttctattatgttttctatcgcgtatgagcgtgttatattcattatggaaattaaatcgttgtcatgtattttgcagaaattcagggaatattttctgtcgaaaaattttgttgggattcacagcccaaagctaattgctggatccagcgaaggtggtgcagctgtattcaagctacagtacaatggacagccagcatgtttagcacagtctcctcagttgtataagcagatggctatttgtggtgggtttgaacgtgtatttgaggttggacctgtttttagagctgagaattcaaacactcacaggcatctgtgtgagtttgttggccttgatgctgagatggagattaaggaacattattttgaggtaaggaaaattggatgaaagatgctttgtattagtataagcaaagtgatgctgactaagtgctgatttctcaacacaggtttgcgacataatagatggtttgtttgtagcaatatttaaacacttgaatgaaaattgcaagaaagaactagagacaataaacaggcaatatccatttgaacctctgaaggtgaacaagttcttgcctctttttgttccccttttataatattatctaactcatattttgatactatattagctaactcatattatgctaattcatacagtatttagagaaaactttgaagctcacgtatgaagaaggaattcaaatgctgaaggtaaatatcttgtttcagtcatcatctctatgttacctcttatttggtatgggtgaatttctgaacatatgtctgatctattgaatgaaccatattctagctgagggtaatatatgattttcttgttgggccttatatgagaaatctactaatggcccaggtttttactgagaatcctaaatatttcatgagcataatttacatgttggtatgcacattgtgtattttagcaatttaatgtagttcacatctttgttgcaatttggacctactgacccagatattggttggtaaaagcttcagtcattgcttcatcctgaaatagcaaccttgacattttcagtcatagaatcttaccaaatagatagatttgttggacattttgacagatgttcatggactaagcctagtaagctacctacaatggataccaaagaatcttgtctggtaatttggtttgttaacattgaccaattcatgacattaaacggaaattatttttcaaaaaaaaaaaaagaacagtgatgaatcttgatcaatcaaatctaaagaatgggactggggagagattcaaccccacagtatttttttttagtacgagggaggaagtgagcacaccaaccgtgttcgcagctcactcaaatttgatataatgaaatcctgtttttgctaaatatctagtatgttagaaacatgttattggcaactttgaagtagaacaggtgtacaacttacagatatactgggttatctgggtcgtcttttttagtaaaaccagatttaattgttgaactaattttttgcttaggtgttggcctaaaatgctttcacagaattatatccatagcgattaacatcgtggtttgtcctggcaggaagctggaacagaaatcgaacccatgggtgacctcaacactgaagctgagaaaaaactaggccggcttgttaaggagaagtatgcaaattcagcctgtagttacttattcgcttcttttcaaaagaaaatgtggtttgacaacttgctacattgtctgtaggtatggaacagaatttttcatcctctatcggtatcctttggctgtgcgtcccttctacaccatgccttgttatgacaacccagcttacagtaactcttttgatgtctttattcgaggtacgtaaatttgtttatttctttgagatgtttgaatttattacagtatatttcagtgtcatgcatgcatgtgtgaggataatgttacctgagcaggaaaacattattttcagtcctgctgcttataaatcctttgtattttagagccatattgttgtgaatcactatcctatatgaaattagtaatgacttccacttttcttcattgcatagtctgacacgcaaaaagatagataaaaatcatgacttgacagaaagtaaaccagaatatgctctatcctgccaaggacttgaattcgccacggggattacttaggatggcacagaaatgaccaacacctatttttagttagtcgcttaaatgcattccatccaatatgatgtgctaattggtcctgacggttagcttgattgagtgtttgatggtgcatcctatagccaacctaggtctgcacaaccacattgaactttgctatcaatttaaatttagtgaaaatttattcctttattatagtcgtgtttgcgtcatcttatctacttccatcagtagtcactatttgctatcactgaagaagatattcatcatgtgtagaagcatcctgttgaccatttttgtgatatgataggagaggaaataatatctggagcacaaagaatacatttaccagagctattgacgaaacgtgcaacagagtgtggaattgatgcgagtactatttcatcatatatcgaatcgttcaggtaagtttatttgtttatcatgttgttagtcctctaatattgcaacatatgttgtaatgctcatccaattttcttcttgtcatcatctaaatcacttcattcaactcatttcaatatatgggtcatcattgtagctatggtgcacctcctcatggtggttttggtgtcggcctggagagggtggtaatgctgttctgcgccctaaacaacatcaggaagacatcacttttccctcgcgatccacaaaggctggtgccataatttgctttttttcccaagagcaaggtttggactcagtacggactgggcagttttcctcggctggtttttttacctggacattattttcgtatttattaatgtgctgtactgcaaaagctgctcctttccacaacatttggaatagttgccgatacatttggaatagggctcaacgttggcgttgtgatttcgttgatgattccgctattcgtaacaatggcgaatccagagcagaaatgaccctatgtcagaaacatatcacatactcgtatgcctatatttccaaaagataagggattatggaaggatgacatattcaagtcccaaaatacaaggtgtggtttgactcgtggtcttcaacatccaacttttgattgtcattttctgtcatggtaccaccttcatcctaatttgacattctctaagtagaaggcaccaataccaagaaaagtgtgaatgacttatattttaaatattggatgtcattgcaccattagaaattaatcttgttggttgcatgtaacacattcaatgatgcacattactcacattactctttgtacaaataaacaaaatgacacttgtttaatgatgatcattttggaaagaccccagaaaccttatgggatgatcaaagtgggatggagggatcatattattatccatattgaaaccaacttcacatgtaaaagaacatcaaaatatgaatccaacaagaccgtatttatatcagtaaacctacacattatatattattagactagtggttagaaaaatttataaaattcaaatcttatacgtgcgtaccttacagttcgagatgtcgaggtggagggagtaactatcttaggtcattattacacaagatgtaatgaagtcacttgtttatattgattcctagataatcatcataatctataccacttttttttcaaaaaaaaaaaagtaatggtggtagcagtgaccaccacgccatcaataacatgtgatttctcatatatacatcttaaagttttctaaaccattttaaaagaaggtaataatgaaaccatcttaaaagaaggtaataatggtgacagtaaatctgttatcaccgtcccatcaataacatgtgataacatgtggtttctcatatgtactccttgaagttaaataaagaaatgagtaataggagtaggttttgttttaactagagagagaagtgggtagctacatcaaaatttgaacggtaggatttgattttaggatgaatttaaggttttttttcaatctcttttcataattattaagataagtaaaagaattcataattttattattaaaaatcaaagaacaaaattattgtatatcgactaatatataatgatgtagccatatttattttctccacgtgaacatgtaatgccatatgattctcttttaatcccgtaacagtgtaaaagcattctgctaggcaagttttaatatagctaatgtataatatttaatcattgtcacaaatgtagcaacctacgacatgtaaaatataaccgaaactgtctaaactgtcactattattatttgatctattattatctgatgagtctacaaacaatctatcccgagaagataaataaatcttcatccttacccttaatttccttaaatctcaagtgcatgtgctacctacgtatcaaaatatatgatgttatatgagatgtacaaagtatgtatgtgcttttttttttagataatgatgtatgtgcttctttaaaaggaagtaatagtaataataagtgatgaatctacaaccactcctaccaccaactccctacctttttagaaagtaaaatgacacgtaggtctagacgatccacgtgttaaccagccccaccatcattttctacatacataatctcttatttttttatacatttgttattgacatgtaggcagtagcatgtggcctgtatgaggcgggggaggggggtggtgaagtgaacggtattaaaagtttacatgtaggcacaatgtgaccaaatggcctacatgtcaataataaatgtataaaagaataagagattatgtgtgtagaaaatgatggtaataacggcttaatgattatttatttaattaatgggataagtacattttactctccttaactcttcgttttgtctaaaatgcaccctcgatcttcaaaatcgggtatttaacacacttaaacttttaataccgttcacttcaccccccccccctcatacagggccacatgtcactgcctacacctcttcttctacctccatctcctctcccctttctcttctctctctatatatatccttcttcttgacagccaaacctccatgcgctagctgctgctgcgcctctctctctatatccttcttcttggacggccaaacctccatgcgctagtagcgcctctcctcagtcaccaccgacctcggtcactggttattcctcgccgacccccactactatagctcgtcggtgaccaccctgagctcgccctgtgtgttgcagctcacttcccagatatcgacgaggagagcggcgtcgcggtagacgcactgtagtggtagcccccttgagctcgacgaggagagcggcaacggcagcctccccgagttcactgaactggactaagagagcatagggcaactcaggctctccagcggcatcggcgagctcaccccaagtccccatgcacgtggatctggcaagctctggccctcttgcgtggttgatgcctcaggaccccaaatccacctcaaggaggcaagtcgatttgtcgtcgcccggatctacgtggatctaccgtcactccatcgtccttgtcagtggcgagagagcggagggagaaaggagaggggtgatgcgacgacaaatggggacggggacagatcgagcagctcactagtaaattcggtttccccatcaagttagttcgtcaccgactaccgcggcgtcgccaaccgtcaagtagatctcaagctctgtctccctctccgacgatctctaccccatccattattgagcggcaccacaaaggtcgtcgaggtggtggtgcccgatggatgagagaagaagtagaaaggagagggtggaagatgggtgtcccctacatgcccaaccttttttttatgtgtcaattggaccaccacgttagttgcatataggcaaagccagcatggtttgaaaaaaaaggttatttattggtattgatagttaggaggtgtaatatacccagttttatagtttgggggtgtgatttaaacaaagacaagagttgaggagggtgtgatttatcggcagtgtcatgttttttcggtgtcctctaaccaattacacaggttttgatgtactgtagtaaattttgtctttaaacaaatatatgagttgagaagggtaaaatggacttatcctttaattaaaatttgagtaaatttcacaaaacaacaggtattctgatcaaactatcgcaaaactatatatttaaggcgttatatcacaactacagatttaataccatatttatcacaaaactacatatttaaggttaagtatcacaaaactgtatatttaaatctttttttacggggaactgcatatttaaaattgaagttatcacaaaactatatcttttagagtttaaacccctagcaccattattatgctagagctataaacattattgttttatgaccaaattggttctaaacatatagttttgtgataatttagttaccaaacatacagttttgtgacaattcatcttaaacgtattctgcgataaatttagtgttaaatctgtagttttgtaatagtttagtatagtacatgtagctcttaaaattttgttgcaatcgcacgtgcagtaggctagtaccagcaaagcaatacggtgcgcatcacagcacagcacagggcaagggaccgcagaggcgcaaaccgtttgcttctaactaccgcggggccaacgaacttttcctctccttcccgcatcctctccacctctcgtcctccccctcccctccgctcatcgtgccctgctccgctgagcacgccgcagctccggatctgtggagccggggatcaggcaggcggaagcgaggtcgtgtcttggcacttctgtggctggttctttcgtagctctagagaattttggtggatagagcgcctcgatcggagaattcgggggggacgagatggatggtctgcctgcggagctgtgcatcaagatcttccacctcctggatcaccaatctctcgcctctgctccccaaggtgccctttttttgtctgctctttttactgccttgtttctcacgattcttagtgcatcattcttgccactgtcgcattcagacgtaagcgctagcaaattgcatcatggtgcctcttcttatcttatgctaatggttcgcagtttaacttaaatcatggccttaacaagtgctgttgcaaaattcagtgtgcaggaagtggaacacgttgacctccgacgacgagctgtggcgcaggctgttcaaggacaggtggggagcggatgctgcagcgttctacgcgccagagggctccaggtcatggaaggacgtcttcattgtgcaggatcgatgcgaccgatatgggctgtaagttgccatcgaattcactcgcctatcatcccgctcgagctgtacttcttatcttggcatgcctactgtcacggtgtcccctgatattcagacgtggcacacattctgtagtacactgcaacaatgtcactctgaagtactcctatatgaactctgaatactgtaagttacgcctcattgatctttccaggggtgtcaggattatcagagaaggaagcgattactacctgatttaccagggtgagatccagaggtacttggggtcgagacagcatgtgagctgcgatagcaaggacgctcctgcgcagagtagcgaggacgagcagcggcagatatccgatcggatcttgttcttccttggagacctggaggctgcatgcgcagatgccaaacgtgtgaaggtgcgacgaccgtgatatccaggaacagcgctgtatgacattgtagttgttatttttgcacatatttcgtgcacatatgttgtatgtaaaatcttcaatccattatccgtagcgtttcacattcatcttatgtatttcctcattttaaaagtaaaaagtttgtaaatctgcgctaatcgccttttacttttaggcttttagcaaagcacgtgtagcatcatctggtaatttttccgccgtaagtaaatgtaatagtcatttagctgcaaatgcatatatgcttaccacgacaaatggatatgtcccatcatcttttctaatctttataaaatgtaatcataaactcgtcgttcgagattaaaaaggcaactggcctctcctgtcagctaaggatgttttacgcaaggaacatgagtactcaaatgtcaattacgagtcaataataacatgaagttcaactggttaactgtgttactgcagctcatgggtgacagtgcgttactgattgaagcctccgtcgaacgttgagtcaacacttgatagcagctcttgccatttccaacgctccctcatacgtcttattgccgccaatgaagccgctcatatgaacaaagacacatcctggaatgccaatatcgtttgacagttcatcatctctcaagcccctccacttttccggcagaggctttcggctctcaaatctatccggagcaacgccaacagcttgtactctccaacttttgctcctctcatcctgcaattacgttatccaaatcagcatacgcagacatcaatacttttagcatgctactggccaacgctagaaagagagtttattctatgatcagaagttcagaactacaattttaagtgcataaacaagggcccttttccttctttcttagattgaataaaacggtgtttgacgagagtaagacaaaacaaggtggaaatcagcaagaccaccctaagggttaatgacaaaatggaggaaacatggcatagtataaatgattgcacttaaagtaaaatttactttcaaggctgtgaaacgtaaatccaaaagaaaactgagtctctgctagagcttcaagctacatgctacttctcgatttcagcttatgcaactagaactacatcaagatattcatatcataggctgagaaaggcaacacttctcacctggtacaacacatacttcgtgaggggatcaatcttcagctcctcttcaagctcaaacagatgaagtttccactgcaatgataataagagattctcaaattacatgcttggaatgattcaatatgttagtcaattcagcagggtattcctgaaaaaagatcttactgggcagaatctatccaaaaccataatttcttcacttggatcaacctttcctcttgacaacaaacactccaagacaatagatctcgcaggtaaccatgacttaacatgaaagcgaacactctggaagtgaaggtgcaaaatattatcatatacaaagagatgaatggcgacacactaaaaacaaagttctcatgcagtaaactaacgtatcacatacagagactattatacctccataaattcacttccagcaagcatcattgcctgttgaaatgcagcattttccttctcaggtgactggtctggatcggtccagtctggattaagacgcccaacgcgtgaagacaagtgtgtgttgttcacatactttgggggttggtctgtgtcatattgattgattccgttgtcgactgcatcaagcgcctgtcacatgacaaaagttattgtttctctgggatcatgcagaaatattggggtagatgcataaacacataaattaataacagtgtataaaagatgtcttaagaaaaaatgatgtgaattgatgctttatagattgaagctttctactccttagtataacggttaaacttaaacaaaaaaaattacttgcattcaagtatatctgatgcctctacacccttctctgctaactttataattggcaccaaacgcagactggatagtaatcatattttgccacatacagtgcatgcagcctatcaagctaattcaaaagtagatcgtgaaaagcccatcaaggtaatgcaaaagtacggatgaaacattgaagcattaaccttgtagtaggcagtcgctaagctatgatatttgttagttggttccatgctcctaagataaaacaaaggatctaatatgtgcctagcaaatatttcttgctgtatgtctgctagtggatgtataatggagctgcaatttatcaactattctattccccttaagggcttgttcggataatcccaccaattaacccacgaacaaggggattgagggggattggagggaaataattccacaccccctcaatcccctccaatccctccttctccttccttgttcgtttacttctccttccttgttcatttaatctccatgaaagaaggattggagtgtttaatctccatgaaggagggattagaggggattgaggggaataattccacaactcctccaatcccccctcaatccccttgttggtggcattaaccgaacaagccatcatggggattaaacgaacaaggcctaaagggtgctcactactgctattcaaataatgccgatgcacagatttatatcaccaagacattaacacagtaagcatactcaagtactcaatggtgatatctggcacgtcaacacttcttaggtcaaaaaaagacagagtgatgcagacgtccaaataaatcaggcgatttcagtgtatagttatagactgaacacaacaaagcacacccacaaggcaaacatttacctaaattccagccaacctttgattctctccaaaaaaagagttggcaaaagtggcaaaacaaacagaaatggaagtttaaaagaagagatcttactcaagattcaacataatcatttagtgtatcaaaagcacgacagtaaacattcaaaggttgattatctgtgcagcttcatacctcaacaaagcttttatatattgcaagatacaaccgatgaacatcttcatggtcttcactaacttcaagctcctttgcaattatctccttaccaaagtgctgtaacatcaagtcaagaatcagtggtaaacatctgaactatagtcatggtcctcaaatggcaacttgtaaatttcaatggtctaatacatcatgctggacaaccaaggaggaacttggtgtcaaataattaagaagaatccatgagcacatcaaggatcgaacgcaggaggatcacaaaaggactgcaatataccacactagcaagtgcatctcggtctaatacatcacaaaaggacatcatgatcttaaatccactaataaatggcccatcaatctgtctagcgtggtaatgcagttaaagcctcttatgtagcagtttcaaggttctacctaacaatgtagagaactttgttcatcgtcgtgtttgctaacaagttgtcaggaaaaaagctcaggtttcagaatgtgaattatccatgggaagtaccttgtaaacaagcccggcactgctaagttttgtgttaaagccatgtccaaagacctcattaaagcccttctggtgatgatcgtagcgatgccggctgggatcatagacaccaccaacatcaagcacagcatccagagtatcgaggatctacaatgatgcccaacaagaaaaagggaaatacaggtaagttaaagatctaagaatctaagagcacattacaccaaatgagaaggtttatgattattgtatcatatacaactacaagcagcgatttttacataaattacacaacaatctgtactgtactaattgttgcacagacgctagtacaatgggaatcattctgtcatggataagagtaaaatcatcagcacctaactaagacacacatctagcacagatgcaagcgggacatttaactatttgctacttttaagatgtggtgtgtaacaatttgccactcataatctatgatatatgggccatcatgtgtctatgacatgtgtgtccagtggcaaattgttaaatgccacatctaaaagcagcatgtacaattcaggacaccagattatacgtaattaggagaaaaacacaactcagttaagtttaacagagagttgcattattagtatatacagaatctaattgaaacacaacatgtctacaaattgtaggaactgccgcgtacagacccgcaacgcaacccctagagacagacaaacttcacagaaccaaagtcattttacaaccccccccccccccaaccaccccccacccaaaaaaaacagaaaaaaaacaaaaaaaaaaccaaaaaaatgtaaggcaatggtaggttaatcgagccagtgagaaggcaagagacctgggggtcgcgggtgcggacgacgtcggcgccggcgaactgggaggtgaggcggatgaggtagcacccgagcgcctcgtcgcagtggaagctgccgttgtgggtccccacgcgcttgccgctccccgcgccgttcgcggagcggccgtcgcccgagacggacgagtagaccctcaagcgcttgggcgaggcggcggcggccatggggagagggtttagggtttgggatcgcacgcggggaatgaacgtgacggctcgctgcgacagcctccaggcggcgagcatactacaagtcgcgtgcggtgcgggcgatgggggatgaggtggtgactttcgctagatgttgggtttttgaggtggggtttggttggccgttcaaggccgccgaactgcaggaacaaggcccgatgcttgcgtgagaggtttgagttgttgccttgttgggctccctcttcgcatccaagggccgggacgggatttgtccccaacttacgggcatataaatatgtatggttggccggccatataaatgatcacttccaataaataatttgttctctttctaagtcatgtaaaatgagtgtatgttcgtgtcttttgtccataaatactcttactttgagttagattaaacgtgtatgtttaagttgggaaattggaggcaaacaaaatagatatagaaatcaattcccactcctttccatacaatggttaaaaactcctatcttattccgtccagcaaatggcgtacgtttagtcccatcacccctccggctgcttatcatcttccacttccaagatttcaaacaaaaaaatttccatccgggctaggataccacatgggcgattgacacatctgccaccttctcccgtcgaatcaagagccctttagtcccatcacccctccagctgctcatcatcttccactttcaagatttcaaaccaaaaagttctccatccgagccgggagactagctggtcaagggccgggagaccagctgggcgcttcaattgcagtgagaaggagagccatccccatccatccctctgcgcgcggattcccatccatccatctgctcgtgcggatctagaatttccgagaggaagaggcatggtgagtttgcaggccgccgagcggcgtgcggtcccgttcgtggtcttcacgccactcgccaagcccctgactgccgcgctgagcagcaagaggggtgatgggatctcagatgaacttattgcatgcatatatcatatgaccaccactttttacactttttagactgcaccttcgtaatgcatgattatgtatggttggctggccggccacatgaatgatcaataattcattttcttttcaagtcatgcaaaatgcgtgtgtgttcgtgtctttttcataaatactcatattttgagttagattaaacgtgcattaagatattagaggtaaacaaaatagaaatcaattcacatcactttccatcaacacgttgcggggttgtatgagggattggaggcaaacaaaataagtataaaatcaattaattcccatgtttaagttgagtgattggaggcaaacaaaataccacagttttctataggatggttagacacaaccttggcattaaactcgttgcggttgccatagttaaattaaggaaaaagcgtggacatatactctagccgcaatagccgtctatttttaaaaaaaaaaaattatggaagaagtgtgaacatatactctggcgagagcaaaacattttctacaactcttgactaattttgtataatctgcaaaaatgttgtagtttttttttctctaattggtatagtttgccagtgtacacatattttcatcttagaattacttatgtaaactttttaacttaaatcatatgaaacatttatcttaaactacaaaatgaaacatttatcttaaactacaaaaatacaactaagagatttagtttgagtgtttgagggaaggaaaaagaactcatatttagaaaatacacaaaacgaaacgagatgagttattagtgtatgattaattaaacattaattatttttaaacttaaaattttggttaatttgtgttttctaacattttttttaaaaaaatacatcgtttaatagtttgggaagcgtgcgtgcgaagaagaagaaaaatcttctctctttatcaatttatcaaacgcagtatatgttgggaaagcaacggcattaaatagcaattccggatgaacgtatggagcacacaattttgcgagcaaagagccaacgtatttcataatcatctataacggtctataaggaataagtccacttcatatcccccatctttccatcgagtttaactcgtatccttaaaccgcaatactggaatcttaaccctcaaacttacaaagtcaggttaaattagatcatatggtagtatgtgtggccggttttgccgacataataacatcttaataagaaaaagaaaactgaaaataccattaggcccatatgtaagtggttaccttacattcttcctgtgattctcctctcatcttttctcttcccctcctctcctccatgtcggggagcttctcctgtcggtggtgagctttgcgacggtcagggtacttatcctggtggttgcggagggtgccgggtgtgaggtgtctagagaaagaaggagatcgtcatcgtgggtgccggcgtggcgggcctggacacggcggtcgccctgcaccgcctcggcgtggacgtgaccgtgctagagcaggcgcctgcgcccagattacggtcaaacccgttcagagcagtctgtccccaaaatcaagctaatcatggcagccacccacacaaacgccatcctctccacttcccctctcagagcaaggataataacatagccaactgctagctctatactaataccatgtcatttatggcaatcactaatataataggttggctgttaggttagctgtttgtttacatctattgaagatttagatatttaatattaaacatttagatatttaatattcgcatgtgcacctgatctcctcgtatctggttggaagaaagcattttttcctttgtgtgttgcgcttcagccgagtgatagatgaaatgcccgctccatctttttcttcccttctcactcctccacgtcggattttgctgacgggtaacatgctagcgccggctgattaggatctattaaacctgctctcaagtgctgccgcctcccgagtcccgaggtgttccacgtcgccgtcctgctcgtgtttgatctgctgacgacggtcgcgtcccatgtggtttcttctccggattcaatcgtgtccaggagtctaatttggtatttctctcttggtggttttcaattctcctgatacattcaatctatgtgttaggtgcagtagttatctcgttgattgctcaatgtttttctccctatcgtcctagcaattagcagattgatcttggttcctataattcgtcgcttggaggagaggagaagaaaagagaggagaggggaagcagaggaggaaggtgagaggaaaccacttatatgtgggcctcactattttaaaccgaccacacatactgctataagagtattatacctaatttaacccggttttgtaagcttggggttaagatttccgatattgcgctttaaactcgacgggaagatgagcgacgtaaagtagacttattttggtctatattttcacgggcccaagcatcccaggaagtgcctccttgtaaatgggcctggacctgttgaaaagacaagcgggccacgtggactggtacatgtaccttgtgcggccgtttccgagttgaaacaatgtccgccgctacaaccgggttcacttttttatttttcattcgaacgtgcacatcacggagatttgtctattgctccgatattgccgaccatgcaaaagcacaaactaacatgatgaatgatgggtgacccagcgtgaccgaccgctgtgatctcggttgctactaccatccaggctccagcacaccaccttcttttctttagggcccgtttgatacaactacaactctagcttcacctctcctagagttgaagctcatccaaacagtttcagctccaccaaaattaggagtggagctgggtagagctctctcacaaaatgaactactccagacccaactcctagagctaaatttaggagttggagctgtatcaaacaggcccgtagtagagtagctgtagctccggagcagctagtgcgctaccgcgctagctccaatcaccggcctaattaagtgccctcgtcatcaagtttctagtagcatgttcttggcaggtttcacgtcaagtttcgtcctttgtcgtttgatttgtgcttgacgacgttccaagatcacggaaacatcaaacatgcaggcagaggtagttcccatggtcactacgcggcgcctttgattgttttctgatgcctactactaccttgaaaaagcgacgaatttacgtgaactactccgtatatataccgattttacttgaaggttgaagcacgcatcgtagcgtaccgcgtacgttctctcgcatacataaaaaactgtactatttgctcgcgatgcacgtactaagttatgtgaattaaattaaagaggtatacacatggtcagaattaactgtgccgtccagccagacgcatcggtactacagcagcaacggacgggtcaatttctggggacgtatgctcggccacctgtcgagcgccatcaaatggcaccaggacaatgcaacaatcgcatcaccggttaattaagctgttcagcacggtacagattgcaacatttcatactccacaagcatagaaaagcaaccagttaacaggacaatcacgagtatcactttaattaaccttgaaaattaaactatagctagaccaacatgcttttcaacgatctgtttaccaacctggggagatttttattatctctaaattcctctcctatctttacacacgggattgatacagcatcaaacacactaacacgccaccaaacaatccaaagggtttaacaaaaacacaaacccgtttttacgtaaaaaagcgactatatttggtggggttttatgaaagaaaaaggtgagagatcttataggcaaatttagcttctacattggcggcgacatcatagggctaggatggacccggcccggacgctgttgccccgctcctgtgggccctccacctccctgcgtgaggagggggccccacgtgtcagcttcccggcgcggcgggctttctccgtcctctccgccgccgcgtccgcctccatctgctcccgcctgcactcctcgctgcagaacggcgtgtcccctctgctcgatcggcacacgaccgcgtgagatgagatcccatggcgtttggcgaagaagaagaagaaacggagagggtgaaaagtagaggggagagatagagtgggcggcacctgtacatgaagatgtcgcggttgccggcgagccgcttccggcagaggaagcacgcgtcaaggaaatgcgtgtgccctcccctccccatctcctcgatcgatcggatcgccgcgcgcagccacaccacaccagcttctccgccgccgccgccgcgcgtcgacctgactactccggcgcgagatccggtggtgccgtagaataggccgtgcggccggctgactcctccggcgagatccggtgcggattcccctcgcttgcggcggaatcgcccgtggtttccctggattctctgatgcgtttctgcgtgttctcagcgtccaaaattcgtgatgcttggtggggaggcaagcgaaggatgcgcgggctattatatagtgggaggggtagagaggtgtcagtaagtgggaccggagtggagatcctgcgggtcccacctgtctgtgggctctggcaggattccgcgtggagaccgacgcgctggtgttgtggcacgggaggtgggccccacggtcgccgacccgctcgtccatctgccgccttccagcttgccccggcagtgctgtggagtgggccctctccggttggtggaaccaacaagtcagtggtagtaggagtagctaggaatggggtttcaggctttgcttctggatgaatcttctgacgatcaccgccggatcaaaacagccttgcagttcagtctaaacaaaataaagaatgcccgctccttgcagcacatgtacacaataaacacggagattttatataaactacagtttctctatttatttttcatgattcttaacaggatcggcaattattaagcccctgtcagatactcagatcttcaagatcttgcggccctggcagctctggaaaaatcttgagaaagtcacacggtacctttggttctttgaacaagaagaagaagggctgtagtttcgccggcgaccagtggtccgcaagtttcagcctggagaggcatgcatgatgcacgggtgtttagcccctctctctcaaacaccccccctattagttgggctactcacatcaacgacctggagcactgcaaggcctgcctcgtggcctggatcctccatgaaatgctgacagaagagctgagtcgtctcgtcccgtaatactggaccagtggaccatcgcatggcgggcgtttcttctgcagaaatcttctgaactttagaattaaggttgccatttctatcttacgggctcgcttattaattaagcgcacgtagtaccggttgcggtgtggctgacgccttacggcgggcaacaactgcacaagccgtttaacttcatcccaaaggaatccatcaagtgtggttggtcatcaggctgagtttgcagtttacaggtggcagtcaaaagaaagcgtaagagcacaaagattgactccgaatattggctgcccttatggattccgtcaaagttcgagccatgcctcagcgcattttcgttacggtaagtcggtaattaacatggttaattagtagcttctcacttgggaaactccttttatcccttaacagaatacctcctcgtttttatatattatttaaataatcataaaaaaatttaacatgataatcaatataacatatactcccaagtaaataagcaaattcacatttaacagtcgcaagtaaaaaaacaaatttcagcacgactagcgtgtcctactcgcactaaaatttattatttttttatttgtacaagatacatttgaatttgtatgttagtggagtaatatatcatatattgatctatcttgttaaaaattttaaaattttttgatgatttttcggatgacatgcataaaacgaaattatatccttgagaggtataaaagagtgatattgtggagagtaaaaatctaattacatcgcacttacttacatgttagagtcgagcaatgacatcttagctaaaagagtgatcttgtggagacgtgtgtgtcttagagcaggtacaatagcaggctattagccaactataaacatattttaatgagataaatgatgagagagaagagcagcgggctacagatctgtagccataagtaactattgtatgaattggctattagattagctatagatgaattggagctagtagtgggctgtactattagacttgctcttaggaaaccttggggagtcttggcttaaaaaataagctgatgtggagctatcacctaggaagttgcattatgtgagttgtgtcgttgttgtggtgtggttatttttggcgtctttgatgattatatatacactctcgagaaaccacgccacgagaccacttaacattggttttcccttccctctttcagcgcatgctgccaaaacgatgtcgggtgtaaagttgtgatgcctactgccaataggatgcttgtgtaaactaatttgctcatcatctaatatattcacacacaaccattttgcgtgctcgaaaaaaataccactttacaatgtaaatgcccttatgaaaggataaattaaaccgaacggtttgattccacaatccaaaactcttctaaaacacgaatattagggaaaaacctaatatcaaataattagaaggggcaaagtttcgaacccagatcggttaacccaccacattgtggagctagccggaagacccttggacgtctctcaaatccaaagctcttctctgttcgctttggataagttccgttatttttagcttaattatatctccatattatcatcaacctgattatatattcatgccaaacttataataataggatttattgaaaacaaattcttcaacattacttagataacttttttacaagctaattgttagttacaatacataacatctaatttatacctataaacaagtatttatatcaccaaccaacttttatccgcatttcaacttaaaaagagcatgccttaagacatgtaacaggttccaaaggtaatataaatatgcttagttgggtactattgtgcaactagacagccaacagatcgaacatcaacaaaggaaaatgaagacgagatggaatagagagggcgttacaatatacattagaaaagagctcataggcttcttttgacagcccggtctgaaccagtacgaagtaaatagaccaaacacgagagcaggacgcctggacgagcatgctgttctaaccaaacctgtatatatatatatgctcatcagcaagcataatgcacaaaaaaaactcttctataattacttcaccgttttccctaccacaaacgtgggaactcggggtcgtggtggtggttcctctcgatcgatccatggactcttcgaaatgtctagtacacacctgtacttgtatatgtagtatcaccccagttgaacgcgtgtgtgcatgcatgcgtaacatgcatgcgcgcgtgagtctccaatccggcaaagggcgcgcggcttggtgtggtgccgagctgagctctctcttgatctctacctctgcggctgcagctgacgctggggcgcgcgctctgatcggtggtggtgcgccgccgcctgcgccgtgggagagtactgctgcttcttcctgcggtgcctgttcctgtccatctcgatctgctccctcctgcactcctcgctgcagaacggcgtgtcccctctggcgaacgaacgacatggtttagctcgatttcatggtgtgtgtgcagccaggcggtggtatggttgagggatcatcacctgtacatgaagatgtcgccggcgaggcccttgcgacacagggtgcactcgtcgaggaagtggtgcgcctcctccacctccgcgtcctggacgcagaacacggacggggcgccctgcctcgccgcgccgcccctgccaacgttcaccgccttcgcgccgccgctgctgctggtggtggtgcccggccggatggcctgcgcgctgccgccgccggagaagaccgcggcgaagtcggggttgccgaaggcgtggaagtaggacgaggtgaagtccatcgatcgggtcgtcgatcggcgccgccgcgcgcacgtctcgccgcggcacacctacgcagtccggcctgccggatccggatcaggcaggcgagcgagcgaccgagcgacgacggcgatcgacctcggactctcggaggaggggcagaggtcgggcggaggtgagaggccgttgggaggcaggcttaatacttgcagggcaaagagcttaactggctaactgttttaccagctaatctctagcttaattttcttcgtctccaggggaaccactcgataaatgcgtgatgtctaatttggaaaagggaaaatggttacaaaacacagcaaaaaggtgacctgtgttgattccgttgcatgcatgcacctaaagataggttatcactaccgtgtggcacctatttttactgcatccatgaccctggtgacctggccaattaattcgccagagacgacgcatgagtaattgtctgcttgacaggcagcatttctacgatgtatattactccgtacgagattgcatcacgatttggccggtcgatcgccatgcaagtcgaggctacggccaatggaagttcgacatcacaaccattcgtgattccaaggtaccttacagatactctaggattaattaaatagacattcccgtcacgtcgacaagcgctccaagacaacacacaaaattgcccttcatttgtttcgttgtgacgaggttcatgataagctggaagcacgcaaaaacatttttatacggccatgatggcgagcgaggacaggaaaacggtggaatttctctgctgccgcgcgctaaaaaccaattgagccgcgcacctgatggtttcgtgcacgcagcttcctgaaatcaacgtacaacaactacgcagtgccctttcgttctacaggaggtatatatgcatgcgatgctcaccgtgtacacctgaaggctctcacatggtttggcacttcggttttgagtttggacgtggactgcgttgtcgcgagctagcagaggggacagcggccgtaacatggccagccagcacagcacagcacagcactgcactgcaccgcacagcagctagcgcaccacggcgatcgagttggtgccaaccgtgtgcgacgcgacacgtacgtgcgaacgcgcgcgtgctcgtgctgagctcggtctcggtctcgacggatcggtcgatctcacgtgtgcgccctgaacaaccagcagccgcagcctgcataccctgccttgcctttgcgcccaagtgggttcgtgctgggcttcaggcacaggggcgcgggcaataatttggcgtgcttagatgtcgtaacgtgtcaagaatctcagctcgcacgggaagagggctatcaagtgcacccttgcgttattgaatttggcctaggttgcctaaaaacgattcttttctctcttggagcgtgcactgtgagcacatgcatggttgcaacttgcatataccaaggcccagcaatgaaagattatctctctattatatactaaaagtccataaaacttcctacaaacattctcaagccgccacgtgggagtcctataaacaatcttaaaacgtcacgtgtcactttaataaacaactggacccactatttttaattagtattagaaaattgttttttcacctccctctcctatccccacgggctcacatccaagcagcccccgcacgtccatacgaacgtacaaacgtacgtaacgaaactacctacacactactcattggaaaaacaaataaaaaactattcattgaaaaaaaaaatgaaaaagaacatatatatgtatgcacatctgcacccacgcgcggttggaaaaggagcgatcaatccttacccctttattttcttcggttgttcactatctaaaattttataaaatatgtgatgtatcttatctataaaaaatattgcatccatattacctatatattttaattacaaaaagttatcatgtggacatatagtcttaataactatatatgtgtgttttaataactgacaactaagtaatctcctaagccgccaagtacattgttgaccaattaaatatggttgatcaattattttatactattcatttatcttagcaataaattatttatgtatgtgcatacgtattgtttttattttagataccttgatgatcataattataggccattaaacttcctataaatgcttctagacttctagcccgttacgtggcaccctataaacactttcgagttggcatgtggcactttaataaaatagagaaattcgaccgtcgattttcatttaactcaatgaacccattattttaaatcgttagatctatcataagaaaaatgtccctctgttcatgactctgcgcagcattctcacgcatctacctaacctaccctgcctccgttcctctcttttttttttctatttccatgataactaaaattattattatttttctttatgggcctaaaaatatccatcaatagacatcaaactactagatctagcaagctcttcctctatactctctttataacacagtaaacatcatacaaatatttctaaataactacatggcactcttaaattagagaaaatccaaaaaatatttaaccatcgatttctacttaaatcgattttaggttgttagatctatcttttttaaaagaatgatcaaatgtaccaaggtcgcaccaacatatatgaccaattatttcattaattacagaaaaaagtttaatgtgataaagttatatctacagtgcaaaattgttctacagtacattgtcattgttattgtaaatttaatagagaggagataatatagttgcacaaacacacggctttatataaaagtccattaaacttcttgcaaacacttctaatccatcacgtggcatcctatatatactcctaagccatcatatgacgctctaataaattaaaaaatcatataaattttgataaaaggaaacacatctcatcattgattttcacttgaattgttgatatgttattttaggctattggatttatctcatcaaaagagaacaacaggacctccaccgttaggttagattgatctaattaaccagagcctcaaaattaaagaaaaaaaattctatgatgcacctcctgcggttgcaggagatcgccatcaccgtgtcaagtttctctgatgagctacaactttatatcgtatacaacacaacttcaactttataaacatggatccgtcccattcatattttcatgtgctaaattgttcacctagacaaaccaacaattgatatatactggagcatagtcgtaaaacatgccatagacatataataccacatataagcaacaaacaactaggggtgaattagttttccggcaagttcaagtaaaaccgaatttacgtgtggcgcgatgcatacaaacagaggtttaattaggaggtaaaaatatgtagtataaaccacatatattgcaaacctaaaaactatcacatgatataaaaataaaagtttgagatttatccacatcatcatgagtaaaacttttatttccaatatacctccacaaatgcttgtaggtcatcttacagcaatgcacataataaactaccatgattgtttaaattcctaagtctttccaacaaagaagataaaatagggtagatattgtgggcttcgcattgaatattatgcacaagttgcgtgaacacaccgtgtaaaccaactgacacacacacacacacacacatattatattgggagtaagaaaaagacatttatactcttaagaccgtcagaatttttgttacggataaaatataatgaatttaagggtaacactttacacataagtgtaataaaaaatgcctaatgtacattagctaaaaaaagttataaagagtgattgtctggagtatataaattcctaatgtttaattataaattttagagtaaaaatatttaaatcatgacgacactgatgaaaagtcgacactgcaataataatcacatatgcggagttatttttagctatgaaataatattcgtaggctatgtgaaatctcaggcactcttccccttaattttttttctcccctaaaagaataatctcacgcactctacacaaaacaatgagttgtttcccacaatccaaaatcaatttggactacaatagacttttttgtttggaatatatatatatatattcatatacactaaggcacccattaaaaatgcagcatatagaaaaaaaataccaggtgcatcttagcaacgagatacaataataagttgtaaaatatctagcaaattttactacataccagaaagacctatcaagttctatcaattgttggcaaacaataatatgggcacaagtaccattattttcacatagggattttcaactttttaattgtatgaatagttattttcatcacaactacgcaaatgatttttgtgagcattcttttcacatttggctcaaatgtgcagccttctatgtggtgagtctcttgcctcaaactcatgagtcatctttgaaaatattttttgcaatccttttacacaaaacaattttagtggagtgcttaaaccgcaatgtagcgttgaagcttttacacataaaactattttagtggagcgcttaacccgtaagatagtattgaatcgatctactccttttgttatagaaaaacatagctcattttacatcataatgatattttattctttcaaaatttttatatttctcgtcatacaagtcatatactcatattaaacacaccaagaggtgaagataatgataaatcaattcagtaaattctatcctatcctttaaagtacctccatgggtttctccacaatctgcatgtataagcgcctttaaggtggcaatacaaaatcaatagcctttcttataataatatgattaaaagttattttttttctaataaattattattttaagattcaggttgactaggtcttttcttcaaaataccgtagggtttcacatattaaaaagaagcgctatacaagatatgtatatttgatcaattaaaaagaggggatagcaggatggttaaaaaaaaacttacgagcaataaaagtttctcgagacttctcaaggaaaaagtaaacaataaaaattcaattaaaatgaaaaatgctttactttaatttcaacttattttgttagaactatttccaaaacaaaataatatacatgcccgcgcgaatgcgcgggctaccttgctagttggtagtaaagcatgatggtttgttttattaactaactccaaagtccgctttagcgcattacctttggcccttttgctctactaaaactaggcggtaaagaaaagaataatcttttgctatatgccaggattccaatgggttgcactccgtacaaatggaaccggaggatcgaatttgttcgatgttactgttcgtgatatatgacctggaaccatatatttttggatgaatgtagtactaatttttagagaagtataaacccatttacattcgtagaatcaaagacttcgtaggttgatgtctcctgaaatgcaggaacaatgaacagggttgttatatatttggttgctactatattttaggctaagatttggcatgccaattttttgttggccacaattttaacaagatctgacaaaaaattgtgcctatgacatatgaacaccaggtaaagttttttcaagccaaatgtgtaatagcaacctaacaatacagtaagctggtcaaacttccttatcaaagatatagcaaaatgtggctactactaaccaaacatccccggaagtgacaaatgtgccaattaagtagattacatgaactagctgctaaccaatatgttacgcggttatttgttatttatattttaaaataaaaaatatttatgttttaatgattttgaaattcgtaattaataacaatcgagttatactcggcctataattttagttgtaacagttctatatttgacaagtctagctaatatttagaataaataaaactagtagattgtattcatattggagtctcaattttcataacatgcatatatatgggtttttacgggatccatgatatttaatgcaaacctaccatgatctatataatcaagtactactagattttttttagttgatataagagtttttatggcgttcacgaaaaaaagtaagagtttttatgatgtgttcgattaatttaggtgtagtagatggatgtattatttggtatcagaataattttatagtggacatgaaggtgggggctacgggtatacggtcttcagtcgaagtgatactgtacgatctactgtatcctaattcttacaggtaactgaaaacttcttggcaacattagagcaccactgattacgttgatgagcacggtactgcagctcagttgcaaatgcaaattctttatgtcaaatactacaacttctcttatttcttccagatcaagaaaaaaaagagttaagcaaaggccgtatatatacagcacagcatacaaatgaatacctacaaacacataccagttgcacacacacgctgctgcagtgtgggcaacggaaaaacaaagcctgtagtaattcacaggcacacgagctagctagagctagcgctcgagccgatcttcaataatctccaggacggctgggtagacgcgcagggctgttcgccgccgtcgatcgagctgaacacctatggattatattacgtgtgtacagcaaacaagccgatgccggagacgacatatttttttagataatagaaatggattacatctccggcttctgtcatacacatagccatagccggagacgacacatgccgcgataatatttctaccgggcccagaccgggatgccgtgcgggctctgccgccgctgcggctgctgctctcccctcgcggcggcgggctgcatcttcgccctcttcttcatcatctccgacgcgtcgtcggcgtcgatctggcgctgcctgcactcctcgctgcagaacggggtgtcgcctctgcacgcgcgcacaaagcagaaaaccaccggtcacaaaccagaacgcgcgtgcggcaagctacaacgtacactacaaactccatgcggcgctcacctgtacatgaagatatccttgttcccggcaagcatccgcccgcaaaggaagcaggcgtcgaggtagtggtggtggcgcccgcggagctcgccggcgacgtcgacgtcgcgggacgtcgtgcgccgggggctcggcgacggtgagactgactcgaggttgccaacgggctccaactccaaggtggcggagaagtagaagtaatcctccatggctcggatcggtggcctcttcttaacttgctgctgcttcttaattggttgcaaggggggagacagagacagttgagatctctgggctgaagaggactgtggttatatagaggagaggagtgaccggagtttcagtttgcctcctctgagtctgttctcatctagttttgttagtgtgttctaaaattttggcggacgatgaattacggatgaaatcaattatttaatgacacagatgaaaaaattaaatactagaaaattgagagatatgtttaaaaataatctaaaaagtgctgaagatatatatttttttaaaaaggtgacattcaataggtcgagaagtgcacccacaataatccataacccctgttctgaatggcttatggacaacggattattgccggtatgttttctaagcttttaaacggtaagatcttctttttttttaaaaaaaatcatcagtttcttagtaaacgtttttaatcaacttatcaacttaattaatttacaatatatacagctcattagttttttcttttagataattgttataaactcggtttcattcaccatccatcagactatcactatttttgaaaaaacccttggactaacaatagattgctcttgtcgatcatctctccagcagtttttatatcattgatgctcttcttagctgaacttgttttaaatacatttgatccgtgaacgtgtatcattaccagagtgacgataaaattaaagatagtacagaagaatgataaaaagacaaattattaattacgtccgcggagactttgcattaacgtagaaatggtaaaaatcaatcctgaggtcatgcataacgcatagctgaacattttattatcatattaaaaacaaccacgttcgtatgcatgtggcgttactatgatcttcccttgccaaaagtgaaaattatattgctgcaggaaaacgacaagctaatcgtaaactcattgtcccaattgaagtctttgttaaaagcatggggagtaagatgtaagaatacatccatcctccaacgaaaggttggatcctccaaattaaagaaagcaagacagaaaaaaaattgtggttattaccaggttaggcatctagctggccaagtggcaacaaatctaaagctggctcctttgagtgctatgtggcgaatcaggtggccgagcaagagcaaaaccagggcgcagggtggcaattggcatggtcttctgatgatattataaggagcagctacacctcgtgggctcacgacccctatattctatgcgttcgcccctttccatttctcggcccctttactttgtagcacacggcccgtccaatttgatggatagaatagttttgtttctagaagtcatcacttgctcctggtttttgggtggttttgtgtgttgagcagtgcagcatgcttgcttggaacaccactaacatagttgaattagtatgcaaattacatgtttaacttttgttgcaagtgaaataaactaagatattttagtcaaacagataggtggtcagccatggcgtaattctgtattggaggtcaaaaaatcctacaccctccgtccaagttcatttctagcatctctcatttatctcaaaataagtttactttttataatcattgaatcagaatatataaaagtagaggataattatattaagagaaaattcatgaaatgccattgacaaacactctaattccagaaatgccattgacaagcgcaacttcctcaaaatgccatcgtacaagcgcttttctccccgaaatgccatcacaaccatagtgctgttaactcctatccgttaagttgtatgaaaagacaatcttacccttgggcaacctttttgctaaaacaacatcattttgtattgtttgctcacagaacattattttgaattgatgcatatttaaattcacagacgtgtattattttgctaccaatcaaattatttcaaaattaaattcacaaattttggcatcaaaattatttcagaaattttgctatcaattatcagggttgtgatatgagcaaaaataggggcatcaattatcagggcaatacacacagaaagtaccaatcatgatcaacatgaattttcacaaaataaagggttcacagtacttagcatcacaacccaatataaagagtacttagcatcacaacccaatataaatggttcacagtacttagcatcacaacccaatacaagagtactttgcatgcttaatacatcttagttcagacaatacatgtgacagtaagaaactcaatcaattattctcctcttgcttctagtccccattgctggactactcttcttgcttctagttctcattgctagactgtcatgtggtacttcattattcttcctccttttggcaggtagagtagtaggttgtactgttggggatggttttctcttgattttcttgtctttgtcctccttcttccccttccccttccccttctccttccccttccccttggcaacaggtgcagcaacatgttgtagtggcacaatggtcatagagctgaaaaaaaaagttatttagcaatcgatttaagttggcattaatcaagtgcaatgggtacagtaaaaaacaaaaatggctaccttggtaaggatggcaaaggctcattattagactcaagtccagaatcactaattgtcccaccaacggcactttaaaatcatatattacacattagttaagttgctgcagcctaggagcaataaaaggttaacaaagtggaaagtggaagatagaaatttcaccttgataggctagccaagatttgacttgacatagcagtaggatcaatgttttcagtggcaacagtggcagcagaagtagattttggttttgatttccttttcagttttctacaagaaaatgaaaataagcgaagtttgttggcaaaggaaatcaacatgaagatatggatatagaaatcacctttgttttgccactaaagcataggcctctttggcttctggatctgcttctttgcaacttgtccatctatggccataatttttgtagataggacacttttgctgacatttggtacctgcttttctcttgcccttcttattcccctcaaccccacctttgtgccttaaagttttgggcctccctgcagaactcttcaatattggaggataaagaaagaaatcacgtgtattctttggccaatgggaaatgtcagttagagctggaatgcgggctgcatatgtggctttaaatctggccacactatagcattcatcaacataatcatgcacctgcacccccctaatagatgtgatgaagcacaaggcatgagcacaagctttccagacacttgccactctctacatgtacatgtcttctcttcaagatcaactacatgcctcttaccaccttttgtgaaaatgcaataataagattatgtccatcaacattaataatgggaattgcaagtataaaaattcaatacgacatacaacataacattacctgggtctttatcagtaacctcggcaatgaaatcatcacttctatctaggtcaaagtttagtcctctacttttctcaagaagctccttcatgacacaaggtagaatgatattaccttccaatttggctaccaccttcttcctcacacgaaatttatccatcaccttttttctaatcttatcaaccaattcgtatggcataagacctttatgctttctgatccaattgttgaagcactccgctaaattgttggtgatgtaatcaaccttagagtgcgtggagaactcgcttcgcatccataacctacaaaataagcaaagacaaaatattacattcaacttcagttcacgtactgaaaaaacaagtattcgactaaaaaaagataccttttgtggtgggttttcaagtatgctatagcttcaggctttacttcacctattgaagccatgtgttcatcgaagtctataggagtccatgcatatgctgctggccataaatgttcctcaaaaactttgccatggaacttgagcttgaaattggacacaaggtgtcgcatgcattccctatgctctgcataaccaaatacctctttaatagcatagtcaatgccttttcatgcatctgaacaaattgatagtctagctggttcaccaatagcttcatgcagtttctccatgaaccaaagccatgtctcactagtctccgagtcaataataccataggccactgggtacagccaattgtgtccatcaatagcacatgcagttgctagctgacctctatactttcctgtcaagtgtgtactgtcaattgctaagtatggcctacaacctcctaaaaaaccttgaatgcaagggtgtagtgccacaaatagccttgtgaatctcttcttgtccttgaatgtcatatggtcaatggcgactatacttcctggggacctcttctcgatctccgccttccaaccatatagcttgtcaaagctactatcccagtcaccatacaatttactcatagctaattccctcccagaatgtactctcttgtaggggatggttaacttatgtgtgtcctttatcctcctttgcaattccatggccccaacactagcatcctcacgtagccaccccataaccttatcacaaacccacgctctctttgcattcctgaccttctcgctttttctagtactaagacaaccatggtacatctcatggaccttaatctgaaaaagaaaaaatatgcaattagataagaaaataacaaaatatgcaatgtaacacattaatgtaacacatacctgcactgctggaccaccatgaatagttgacgcatgaagcctccatccacatccttctttgatacatctagctctgaatctactaggatcagttttttcaacaaaaaaactcgaattctttcttaatggaatattgagccacagccaatctaaactcacacattgaaggataaatagtctcaacagtcatgggtgggttttctttgtcatatgcaacttgtgggattactggatctgcctgagcatctcgtgcaatccactcttcatcatcactatcagtgatactcagatcatctcccccttctacctcaggcacattatcagtttcagcaatagagtcatcactctcagatgaagagtcatcactctccgatgaagagtcatcaataccaactgagtattgtttctcatcatctacacctacatgctcatagtgcggaatggattttctaggtatgcatcacttttggatgcctgactagtgctgccttcctgagtaaaaaatgcctgagaggggactgaaagtgatggagtgcaaggtacaatagcttgggacaaattaatttggtttcccagagtgattaccactttaccccttttagtatgatgaaagcactccaacattgctgtcaagtcctgatctttgcatattggaatgagttctttgctactagcatgaatataatgcaaacatacagtttcatttaaaccccatggatatttttcacaaatatcacccagaaaatctttgaagtttgttacgtctgcatcaataggccatttgaaagaaaaaccacccggaaattcaggcctacatgtcttacccattattctcacgtcaagtaaataagtagaagatgtgtccattctgttgatgaacacatcgtcgatgtgtgagaagaaaaatgtgaaaaatgtaactgctctgactccctaataaaagtatattactcatagggcataagatgaaagacatacccatccggaatccaagatgaatccatcccctcatgttcatgctctccttcactgtgctccaatccatctataattccaccacaatatctcattcacatcatgcagtacaaattcttcaaatgaaaccaaacaaaagaaggaaaatggaaccacctgagagggatgtgccacctgctgggactattatgccgctgctagtgaccaccgtaccggcgcatgcagcccccgcaccaccccctgtgccgccacttgccacctcctcgcctcccgtcgcctgagagcctgccaccgacgcgccgccacctggagccgccgtgccgccacctgggagcaccacatcgcagtcgagggccgccgcaccgccgactgggagccccgcgccgtcgctaggggccgccgcgccgtcgcctggagccgcgggccgccgcctgagggtcgcgcgccgccgcttggacccgccgcggtgacccgcgccgtcaccgggggctgtcacgccgtcgcctggagccgacgtgccgccgcctgggagccccgcgccgccgctgagggccgccgcgccgccgccgagggccgccgcgccgccgccgggggccgccgcgcctgagtgccgcgcgccgccgcccgggagcgccgcctcgctgccgccgccggggatccccgcgccgccgcccgcgagcgccgccgcgccgtcgcctgggggcgctgcatcgccgccgccgtcgccccccatcggttaggtttagggttccctctttttttccccaatctcttttcttttaccgcctgtagacagtataatttggagcgagggtaatctggtcattctggtaaaaataaaaattctaacggtgtggactaaacggtaagttgactatgatggcatttcagagagaaaaacgcttgtacgatggccttttgaggaagttgcgtttgtcaatagcatttctgggattagagtgcttgtcaatggcatttcatggattttctcttatattaagagtaaataaagtaagagatagttatattggtatttgataaactgatggtattatatttttttttacttttttattcatatgtgtggaatgggtgaaaaatgattctattctgagacgttgatgagactatgactgtatttgtggaattgtaaatgagatagtgattatttttttaagataatggaaatgcttaaatgggaaactgatacacttccgttttgccggctgcccatgcttttcccagcaaaaaagagtaacatcactttgctgcctattcctatcggtagttacatcctgcaagctcttttcgcttgccatctgtcgcttaattgctgaaaccatgtgccggcctctacagctacagcacctacacatagtttcagactccagatcaagcctgaaatgcagcgatcagtaagctaagggccctgctttaatcaagccttaagtacgtgtctttcaaagttttgcgagcttatgagaggcagacacatcgcacggttaggcgcgaaaacaacaggggcacaggacaccgatcgttccattccatcccttgcgaccaccacaaccatcaatggtagtacagcaatgctcctctttcccttttggcctcttaaactaaagaatttttctttcgtccgaatctttctttaactgctcttttttttcgtgtcacgaactcgggaaggcgtgcatattagcttcttgtaatttgcaagatgcaagtggttacgagacgtattagtaccttttgtcaaaagggaaagaaaacaagaaagaggttagtacatgagacgctacctttgggacactttaccatgcataggttgattgatagacaatgcatgctacgggtgtgtttagcttacgccaaaattgaaagtttggttaaaattggaacgatatgacggaaaagttaaaagtttatgtgtagaaaagttttgatgtaatggaaaagttaaaaaattgaagaaatattttggaactaaactcggcctacattgctacgaccgatctgaactgtactccctccgtcccaaaaaaaggcaaaccctgtgtttccgtgtccaattttaactgtccgtcttatatgaaatttttttataattcgcattttcattgttgttgaataataaaatatgattaatattttatacgtgacttgtctttttaattttttttataatttttttaaataagacggacggtcaaacgttggacacggaaactaggtttgtttttttttttttttacggaggggcgaagaatgtagcagctaacgtcctactacggtgctagtgtactggattgcatgtgtgcagttgatcgagggggtgaccggtcaagtcaatcgtccgaatgacgacgcggacaaaaggtgctggctgactgggtctagccacgcgcacaagctggattcgcttgatagttttcgcggaaggacgcttatgattttgctttgtgagagagaagcctctgctgctgcctttttgcatggttcggtttcagcggtcggagcgtgataactagccataggttacgccgtgtaaacagtgagcgacattgggctcaagaacgtcggaagcctcacgaacgtcttgggatggaagtacgcagatggctgtgctgtgtcatgtttgttttcggtcaccaaaaattacgcactgttaagctcaaattgcagtgctatgtgatagcctgataggtggtagtattagttttccccatcttttaaactgtactatagttctaaaaaaaactgtactataaaagatctctaattactcattatcaaacagtgcaataggtcatcatactaatcggtttgtagtactgccttaattcgtttgttcgttcgttaggaagccggcagcggccccgcctcaactgttcattttctttacatttctgcatttggggccaaggccaacggaccaacatcatgttgccggtcaggatggccaagatcattgcacaaaagcagctacaatgccttaccggttgatctgctcaggtgacaagttaatagtacagaatcgaggcacacattttacccagtaggatctacggctctcaaggatgaaagaactggttgcaacgacacagcatcaaagttctctcccacaggtcgaaaaggaagggaaaaatcctcacacaagaaaaaggggaaaacgccgtcatatacacgtattttctctaccgcgctatttctcttgctctaatacatgcacagaacaagactgcaagggtgatggacagaaaactggaattaactcggagcttgctgcttgccctgactcatctgaatattccttgtgcgttcatctcatctcgatcgggcgattccctttactttctcaaggggaccccggatgctttacttgcgcctatggcttagctcaggacgggcacattcgccgcgacggcgacactgccggcgtcgagcctgtggcgctgctcgtttcttgcagcgcgctccctcgcattcgtggcgctaaccctcactgctgcttcgtccatctccatctggtgatcccggcactcctcgctgcagaatggcgtgttccctctgtttgttcacaacaaaaagaaagctcagtcagaaactattcagaatcagagctcagagaagctgatcgcttggtgatcactttgtattctcctgcctaattatccaagtgattcaaccgataggagcaaaattgagcgtgaaacagacctgtacatgaagatgtcgcagttcctggtgagcggcttccggcagagggagcaggcgtccatggcgtggccggacaggcaggcctcgccgccgtcgagtggctcgatgtcaaagaacgaagaagaggacgacgacgctgacgccatctcggttacaacttacaactcgagctgaaagatccgaggagagaagaccgatgagctgagcaagtcttggggatcactgccaatacgggagagacttgaggctctcctcttttataaaagagaaagggggttagtggtggttgctgagtttggtgcagggggatgcgcgagaaaccacggctagatttccaggaatccgtggcaaacaaagcacggctcgcatcgccagcacacacgcgggacacggctaaactggccgaaccggcgcggctagggccaacacaagaagtgttgccccggtttttgtttgtttggttgctcgcgattagtctcccctggttgccttggagaccttggtggcgccggcgttgtgaactgcaatgctgcagaatccaccggaagatctgtaacaaacggggacccggtttctttatgcgcaaattcgattctatggggacctcttgttgtggccttttgctagctgtttggttttgtttattgcgccggtctcgccacgtgttgaggagtgcacatgactaggacacattaaattacaccttcaatgcggtattaaggacattaactgatgatagtttagtcacatttattatagtgtacaataatttcgaaacagagaggacatgtttctacgtgaagcatgttgctggctttatgtattttctcactcctttttggaggagaagttggcaatgaaaaagaggaggaaaggcaaggaaactaccggagcgaggagtgagtagtgaggctgtagcagcgatggcgacgcacgcgtctctagttctgtaccgcaccgtgtaaactttggaagcgtcaccggtgtggacacggacaatttacggtggatccaggaacaaattgcaggggatctagtagttaacatatgtatagttgcagtccgtgtttgattggttcttgacacggataggaattccccttgacccgtgttgaccacgttggacgtacgccagactgagacactgacgatgacaaacatttgtgtccgagccgacgaccccatggtcaagtaactaaagtttctgtcatgcatgtccttaacggacttcagggagagacagattcaattcgtctgcttcagttcagtacgccagaaaattcatagacgtgcagggcgcgttggcgtgtcgaatggtccacgactccacagtgggagtggatctacgatccaggaagcacattttccgtttcgtggttaatgcacattttctgttttgtagtttaatgacctggtctgaacatgcgtgatccactgatcccatactatagaattgcgcggtgcagcagttcagttcatcagaacggtgaccgggatggacaagggcatgcgtgccgaaatttcatttcatcaatatttcttcttgagttttgcttttgaaggagattgttcttgcttcttaaccatatatgtttttctcagagagaatcagaaatattgaattctaaatgctgtaattttttttacgtatgtatgtagatactccctccgttctaaaatataataacttttagccttcaggatttgtcccaaaatataccaccaacattctcttcccaaccaatcacaaccctccaccattaactttcccacctacctccactattcatccaatcacaactctacaccacccacttctacctaatttcttaacaaccgtatataattctaaactttttatattctgagacagagggagtaatagtttttagaatcaactagccaagcccaaaatgtttagaattcatactccgtttatgacgggctgggtatcttagcccgtgtaggcccatgaacgtcatgttgggctttgttagtttatgacgtttttttggggaataagttcactatgggtccctctatttgtcgtcaagtccgattttcgtcccttgaccacaaaatcggatatgacccgtcccccaacttacgaaaaccgggcaaacatggtccctcggcggttttgatagtggttttggctgatgtggcgcctacgtggctaatttgactcggtcttcatctgacttggcactgacgtggcgcttacgtggcaaatcgaatcgaaaaataataaagcccgtgggacccacatgtcattttcacacataaaatttttttaaaaaatagtgggactcacgtgggccccacatgtcatactcaccccctcatcttcttcctccctttccatctcccctctctccatatctctcccctcctctctctagcctccaggcgccacggctcactgggtcacgggaaggttcagcggtggtggccagcgacgcgacagcagccgccggcggcgagctccacctctcggcgcagccgcgcgcgtttctaaccatgcgtgcgcgcggctatctgatggcgtgggcggcacggatggattcatggatctaatcccgtgccagcacgtagcccccggcgacgcgacggcgagacgacgacggctggcgacgtcgctctcatgccggcaagagagagtacatcttcaactgccagcattaatttgcatcgagagagaaaattagcagtagcatcaaataatatcgtttcagtttcgtcgtaattaagctagctagccatgtgaggagtcagttccatgcctcgatcgatcgtcggcgtcgaagaggggtcaagaactcaagattaggcgatcgattccatctgactcatcggctgaatcatacgagctaccgtcaattaagtactcgtactaacgtacgcgtgtaaatgctattgactgcatgagagaactgtacaagtcctgtgcttacacaatgtactacggcctagccatgatctagatgatgcagcaaaagaccttttaattaattagtcgatcgacaagcgatccatgcatgcatgggagtaatttacaggcttcgagttcatacactgttgcattgtgacttgcgaaaaacacagtgctacactgagaattaatgatggtcatccgcagctaagtaatgatctgtgagcaattagcaattaccagttactgacaagaggtgagtaggtaaaggcattattagcaagaactgcatcggatcaaagttcattccggtggtcaaaactcaaaaccccagcgagctgaggcgtgagagcgacgtcgccggccgtcgccatctcgccgtcgcgtcgcgggggggttacgtgctggcgcgggattagatccatgaatccatccgtgccgcccacgccgtcagacagccacgcgcgcgcgggtcagaaacgtgcgcagctgcacggctgcgccgagaggtggagctcgccaccggcggcggctgtcgcatcgccggccgccaccgccggacctccccgtgacccagtgagccgtggcgcctggaagctggagagaggaggggagaaagatggagagaggggagatggaaacggaggaggaagaagatgagggaggtgagtatgacatgtggggcccacgtgggtcccactattttattattattttatgtgtgaaaatgacatgtgggtcccacggctttttaatttttccggatcaaattgccacgtaatcgtcacgtcagatgaagactaagtcaaattagccacgtatgcgacacgtcagccaaaatcactgtcaaaaccgccgagggacctcgtttgcccggttttcgtaagttgggggacgggtcgtatccggttttgcggtcaagggacgaaaatcgaactggccgacaaatagagggactcaaagtgaacttattcctttttttgggctgtttatgacgtcctaaaattacagcccaaaatgttcgcgggttcagatatgaaaagcgggagaaccgggccgtttcatacatgggctttccgggtcagcctttcgtatttctggataattttgcttttgctcaactgttcatctttttcctcgcaattcaagtatactatccaatattgccagattcccctctagaagttccacttcgtcagattaagatggaaacatgcacacttttttaaggtgaaaacatatgaccatctagtgctaaatcataccgataaaatacaacacgttattcggttattgctcttcatgttgcttcattagaacttatcttgagggtcaacgagcatgtcagctcttctgccccgagataattgattacttcgattggccagacgatgatgcgcgttgggttgacaaaacgcattggattcaaaatattatcggcgacctatcagctgtgcatgagctaaatgtggatacgcgaatccacaatcgttttaccgggagcacgcattcccttgcaagtttcaagtcacccgatgagactagccgatcatgcatggaacacgccgcatcaaaccatccatcaacaagatcagatcgatactggataggtcacacacggccgcgatacctatcaacctcgtgaagaatcagaccagactccaacctaaccatcccactaggagagaacgatggcgccccaaaattacaaggaagaaaagaaaaagaagagaacgatctgaacctgcaacagcgacccattcatccatcgcggcaacaacaccacccgtgaagaaaacggatcagatttcggggcggctgctacgagctatacgaccgattcgcggccggacttgcagccgccgctgccgtgcaaccaatccaatcctaagggggaggtgatgccactggcgtcgcacatgacgctaccggacggcgggttaatagccgggcgcggcatccatccatccatgcgaccatgcgtgaggcatggggtcagtctccgtcacgcacgccgcggaggcaggcggatcgcgttggtcattggtgacggcggtggtggtggtagcaggtagcgcgacgagaagtgcgtgccctcgctgcgatttcgctcatctcaaccacggctgttttaatggccctactaactgaacgctgctgcagtccaaaaggaccaacctttttatgaaggcacgcgtactcactggcagcatgcatggggatggggtgcgctactggtgtactgcttaccgacggtactagtagcgcgttggacggactaataacttatttcatcgggttaggctgcatatgcacgaatttgtgcatcatctacggcctggagccctggacgctagcaccttgtcactgcatccttcaattccctttgtaaagcttagcggtaaaaatttctcacagatcggaatcgctctacgccgttggtcgatctcttcgcagatacgtcaagatcgtaaggtagaagtaattaattactccgtcatagcagtggcagtactagtactactcccctactgcctactgtaatgacagtatcttgcatagtgctggtggtgcctgccgttgcgacgagtccgtcgaccatggcatgcatgaggggcaagggctcccctatacccacgtcccaacacccatccaccctggcaacgttcgtgccagcctgcggctgactgctcctccctgccacctcggcgaatccactccccaccaccagcgatgtcaagcagtcgcacgccccgcgattcggaagccgttcgctccgcgcgccggtggtgtgcgcgccagcaaccgacaaccgaaggcactgtgctgccgtgccgtcccgcgcccccgcaataacttcaccgctccgaggaagcgcgtcagttacctcgcgccaaggcattaacggcctccgcgcgggggtttgaggtttgagcaaatgcgggggaagggaaaccaaccacgtcgaaaccgcacggcagcacgggatggatgaccaccggggtagcatcacagcacggtgggtgtgatcggctgttaatatcaccaccaagtacagtaccccctataccatagtaccattggtaatatctacatcagttatgtcaatgggttgcaaagacgccaagacaggcacggtggaagcaaattaggagcgaccagttggggattatgagagccagaaaaaggaaaagaacgtgcagcttcagctttgcaaattgctccgtactactattaacaatgaacttatcaattgaattctcctaaaccccaaatataaaaaaggagatttgaggaagtaatcctcggtggtaaaaaaaagttggaaaagatatgaacaagaagatgaaagttctaagttttttttcttcttccctaattatgattttctgggatgggcaatgatgcctccgcaccagacactcacgagatggacggccgagatgagacgacgacagctcaacagaggatggcctccacgccccctgtccggacgcaatggcagacggggcacgccatggccacgtccacgtcgccggcggcgaagcaatcgccgcagaggctgaggtgcctgcaggggaggagcaccacggtggccggcctcaggcggcaggtgaggcaggcgcggtcagacccgctgcggcgcgggtccacgtacgccgacgaggacgactccgccgggcccgcctcgccgccacggagctcatcgccggacgcccgcgccgcggccgcggcctgctggagctgcgcgtggagggacacggcggcggcctgctccgagagggccttcgcctgccacgccgccgcctcgctgcggaggcgcgccagccgctcctcgagttccgcgccgcgccgcgcctcgcgctccgcctccaacgccttctccctgagccggcgcgccgcggatcgctctgccgcgacaagcagcgccctgttatggcgccgcacccgatcggccatcgcccgcctgagctgctcgccctgtccaagaacgtgccggcacatcacgccacggaaaaaacgaaccaccgaaacaaacggatcgtgtggggggcaaaatcgtcgattacctgctctttgatgaatcggtcgagctcctcatcttgccgcttcatctgtccggcaagctcgtcggagaacgagacgaacggcatgggcgacgacgagtagcacaaggctttcaggcgtttgctctcttgttgttgctgctgctgctgctgctgctcatccaatgccaggcgaaggccagtggacacgagtgccgccggcgcgcgggacggcgacgccgataccctgttgtggagctgcgccatgttgacaaacgacgtagactgctgcggctggagcgtgaacagattgaccaactcctccttggccggcggcggcgccatggcaatggcctccctcgagcgcttattcctccgattaatcccactcgctgcaaagaaaccaaaaccacatacgcccatgtcacaatccaagaaccgtagtgcggcggcgccatggcgcgaccttgaactccttcaacatcaggctatctatctatcaatcaatcagtcagtcaccaccacccacctcctccgctgggaaagtacacctccggcgagactccggcgaacatctgcggcctgggcaggtccatctccttcgtcctctccggctcacctctgtaaaccagacgacgaataatccatcagcccaaaggaggccaaacctttaaaacacgtagccgccctaacgaagaagaggagacaagccgcacctatcgtggaagaggagactggaagggtactgggcctgtaccgccattgttaagaaggaagagagggagggcgaggcgaggcgaggcgagaaacggacgggtgggtggttcgcgaagcgggaggtgacgacggggaagaaaacttcctcgcgtggttttaataggggtgcggacgagccgagtccaattccgagagcacccacttcgcacgcttgcttttaaaacctctcatcgcaaggaacaaggaacggaacgggctcgcaccgcgcgctcgctcgatcgtcgatgggaaacgagtgatgcgtgaggagggagcgttgcaccaataaaaacggaaaagaagggggcctaaatttactggaggcagaggcagtagaagaaagatggtagcggatatgggtggttaaaattaggatcccagaggatcgtgggtggattaaaagttaagcgtctgttcttgattttttttccttacgttaatgctgaagattagtgatcgataaatggtgtctgtggtttcgctgtgccacgcaataatggtggccaaggcttttggaatacgccgtagttagtaggaggaagttggaatacaaggacggaagaaagtttcctttgtactagctgagccattgaactttcgaaatatgagatcatctatctattttttttagataatggtgagatcatctatctatagatctaccaaatctttttctatactaatatgataatcaaatgaaatatttcacattatttcaggagacagtgaataagtatagcatttttttatgcgacagcccttaattagaacatgaataatggtataacatcttagtctaagaagagaatactccttccttgtaaccggcaacgaccgatctggtcagttgcgttgtgtaacaaaactgtattttttctaatatagtgacgtgtactccctccgtttcacaatgtaagactttctagcattacccacatacatatagatgttaatgaatctagacacatacatatgtctagattcattaacatctaaatgaatatgggcaatggtagaaagtcttacatcgtgaaacggatgaagtaatttttttacgcgttcgtgaaaaaaaagagagagagagagaagagaatgtcatgtagaatttaattttttaagtaatggagatgagagaagaataccgtattaattaccaaacggtatagtagacagcttaatggaataccatatatacaatatgtatattatctatataacttaaataattaattgtaatatattattagacaacatttttataagtcatctatacctcgtctagatataatgtgaaaatattatcgatagtggctgtacgaatcattgttcattcaattcacttagattataaggatgaacaaactaattacaacttgttaagtacttagagttatttagtaactaaatcattaaaaaaagaatttaagcggagttcgactttgtatactgtaatttcaaatttatggattatctatcaagaaaaaaattgttactccaaaccatgatgttatatttattaagtagaagcacacatgagttgatcaaacatataaatttcaaatattcaagagttcggatttgtagatttgataatgtactaaactgaactctgcaaccattagagctgggtacttattaatattcaatcatatcattaaacaaaaaaaatacaattgtgactctaaacccaatataaccttatatttcttaatttaatcagaaaaatagcattataacccaatgacaagtatactttgaactccctccattttcagattataagtcgttttgactttggtcaaaatcagactactttaaatttaactaagtttgtagataaatataagtaatatttataacataaaattagttttattaaattaataattgaatatattttcataatatatttgttttgggttgaaaatgttaatattttttttctttaaaataatttaatttaagaaaataaattatggaagtatttatgagaataaaagagtacaattatccttgccccaacaaaaatttcataggcacgtattagagcagacgagctacgtggcctggcatagagctagcgaaggccgttgcagtatcgtgacacacagctcaatgtgttgcttctacacatttttagttcatagaaaaaccagaatcattaaacgatattcctacctcctaaatatatcacctaattgtaagctaagcatagttatgatattaagtgacgtgacctatcttaggcgtattacactgtagcattgtcatcaagcaatattatgttatgggtatctcaactaatatcttgtgacatggaactcccaaccatttaatgacgcatttagccaccgatatttatattagcacgtatatgttgtgtacttctttttgcgaggatatattctgtgtactttggcgaatttacgtttcgacgtggacgaaacgaacatctgatgccagcgacaaaattcatgttttcattcctcatgagaagcttccaaatacttgattttccaggcgccttcattccagctgtcaaatattcaatcagaagctgcaattataaatgtacagactaccgagtataaactgaggccccaagtaacacgttgcgttgcttctcggcagataagagaaatgcataaatacaggggagcaatcaatcgttgaatttgtagcgttgcctccttttcaagtacttgctgttgttgataaggaggagaatttttatggagaaaataaaaaagaaaacccgtgtcttgttctagagtgtagtgtgtttggttttatggcagggctttgtttgatctttctttccttttcatgactttcattgtcttgcgggggaaaaaaaagaagggacggaaatcaggcggagattgaagcatccaacctactcgagtggttgtcgaatgctttggtttggatttttgggattctttgattgatgaaaaatgatgaattgaccctaatgctaacaatgacatctgttccactggctttctttttatatttgtaacaaataattctccatgttttgattgagtctagctagctagctagcttcatatatatcctaataggttaataccaaacttgataggggatttgtgaggtcgccagtgtcatgtcgtgcctgaattggagattaacaagcaagcattgaaaattattgttgctttccagttggtgcttcctatatacttctagctagcagctgcaccaatacacacatgcatatcttagctgccaaggactagcaagcattggcgtgcgtaggacccaaagttagatgcaggcggagtttattgactactagtaccagttgtaagttgattgagatttggtaaacagcattaggaccaactagaattaacctctccacttttaactcgacatcttcagaagcatggcgattgaagcaagaaaccaaagatgggagggaggtgggggcaaagagagagagagagagagagagagagagagagagagagagagagaaaagaagaagaaaatgtcctctagaatattgcttgagaccgaaagattcaaaagggagagctggctagaaagaatcaaatgctgccatctttgttcccaaggtgcttgtcacttgacatgcaccgttgcatctaccttccttgcaaacaacccctccccccatgtcaattttcgcaccccggatttaattcctcagccttttaaaaaaatttccatccatcgatctgcacgtgatggcgattgattctgcacactatagcagcaagtttacctgtagatgtgtagagccatctggagaaggatgcataaactaatcatcaacggcgacaaaagtatacaattcgctggtggcattgggggttaagctagcctcgaatgtatacttcacctgatctagagacagatacagatatatcatctggttccctgcaagactagacgacgcgttcgatcgtgggcacgcgattccggtttggaaatgcgtggcctcgtcgtcaaacccaacgcaaatgcgaccgaaatgtcaatcacaccaaacccacacaaacgcaacacaccacaccactactactcctatactaatctctttttgtcagagagttcgtggtattgcatacctacaccggatttccggattggtttgatccccgttgtttaattaggccggtacgttgcaatcgcgaagaaacggccggtcaaatccggcgtggccaggacgcggccacacacgcgccacatcacacaccgagacgtacgtacaggcagcttcgcggcgccggcccggcgcgttggtggcgacgacgactgagagctacgggagctatagtgtgcgctgtttcagataacgcgccggttaggtctccgacgcgaacgcatgcagagaggggttaagtgcgggcgaaggaaaggcgggggaagatgacgacgacgacgtactcccatcgatcgatgccaatgaaatgatccgtccacggccatgcctgcactgcactgcaacctctctcttttctttcgcaagtgttccgggtgggcatccatccaactgggggcgtggcatgtgatgcctcgttgctcctttcgaccgccgctgggtcccctctctccctccatagcttggaagcacgcacgtaatactagcacctaactgttgaagatcgatcgatttttgcaattcttccggagcggaattgttgctagtggttgttgctgtcagaggcaagcgaccggcgcctagctagctccgatcgggattcagatcggtcgaccgagaccgatctgttggggtcttggtatgtacgtgcgtgtacatgttagttgatcgtttagtaactggtagttggagcttgtttcgcttgctcaacaatgacttcgtttaattatccatgcagagaaagaaaattagtgcatgtacaatggttgttaatagtggtctcttagcgttgctaattaggaatacttgttgacatggaggaaagagaaagaggagagacaaaacatcgttgttatgcatgacaatggcttaacaacgactcttagtcactataatatgaaaatatggttgcatgaggatataaatatggaaagaatattaacaaaaggaatattttttgagttaatgattaaagcctttgtcatctcaactattgtaaagatatggtctctaaataatcttatattgtttaagagaccatacccgtctctaccattgaacatgccctaagtccctgacagagacggtaaccaaactaaaaaaacgatctatccggatggattgtaaagacggattggcggtacgccatataagtaccttcaaaatcccctgcatgccggaccttgtcaaatttcacatgcatgtacttgagtgaggttaatggaaccagccaaccactaggattcaatcgaaacttcagcgcggattacatcgatctcgatcgtgttcacatgttgatctagtaccggcgttcatgatctttcagcaaaagcgatcgaatacgatggatgttacagttcacgaccgtggtggtcgcgtcaaatgtgacaacgaactctcctcccgtcttgacatttgaagcttggaccagggcctacctgtcactcgccggcaatgtacattgggggcgagccctgttgctatccgtctctccatatgcttggaacccgtgggtttgcaagcaactagctagagagcaagtttactagtatagccaactattaattttaaataatctatagttaattaaatagacaattcacacaatagttatatataaacatatactacactattaatacatggtcccacctatcatatatacactatgtcttaagtccgtgctgtaactggttataaatctgtatcctactgccctcttctctcttctcttttatctcatcgatatatgtttatagctgatttatagtctgctattgtacccctcctagtactaatataaaacacatatgtacgaatacctagtaatattatattccctctatttcatattataataactgctttaactttttaagtcaaacgtctttaaagtttgataaattttatagaaaaatatagtaatacttgtagcaccaaattattacatttaacattgaacatattttgatattttttttgtttcgtgttaaaaatattgctatatttttctataaaattgatcaaacataaataagtttgactaaaaaagttaaaacgacttataatatgaaacgattgtagtacacttaatattgtctccccgtttctaaatgtatattgctattaatgtttagacatgatttgactgtttgtcttacttaaaaaatacataaattaaatattatttttatgttgagtacattcaaccaaactatggtaaactataaatttaagatgatatatcacaaaactatagatttaataccaaatttatcacataacttgaaatttttcaccaaactacagatctagtaatagttttgtgatatttaaactgaaacatgtagtttatgataaatttaatgtttaattaatatttttgtgatacaccattttaatctatagttttataatagttttgtcgaaatatccatagtttttatgaaatttactctttttatgttaaatgtactttaagcatgccattttgttcgtattcacaacagttatgtaacaagatgaataattaaatgttacatccaaagtcaacaacgtcatatatttataagtataaaaaatatttttctacaagtcaaaatttagtattggatactctaaaaatgtgatgtctaccggagggcgggaaactattttaaactctcgagggacatcccttcgttattagcattccatccaaatggttagattaatatgtgataattaaatcactccacaaacatgcactaccatatttaatgtctacaagttgcaacgaacaaaaatattttttgactgcgaatatacgttaactagccatagtttaatttgtttttccgttgcaacatgtagaggttaaatttaaactttcatatttgtggagtgatttatgatatattaatatatctttttgacttttttcaaaaaattttataacaatttagataacatacaaataacgaggggacgtccccttagagagtttataattcattcccatcggaggacaccctaaaaatgtagctttggttgtagacacctaaccaaacatgctttttttttctctaggacaacgcctgcaatattatattatttccgactattttagagggagaatcaatgtgaaatgatgagaataatgttcctagaaaaaaacttatgtatttaattggaccaagccacctcgacactgtcacgtttacaactgtagtcgaaccacacctcaaattttgaggggggtatgctagttattttgcaaatttcctctatccaagttagttaaaaatgataaaataatattaccctcattttcatgcattaaagaaccatagatttgatgtgttcatgggcatagacacatttttagggtattaacgagtaaataccacgtttttttttgcggggaaaataccacgttcttagctagtgtggtgttgtaaatttttctctttttttttgagaggaataaaattttcttttttatacaactatagtagtagcctcgcttgatgtaaaactcaaggaatcgcaaggcatgcatgacccagacttatgtttctttgtacgagtgcatgcatgcacggttcaaccttagtttgagtcatccgagatgtattgctcggaacagccgtcccaaatggctggcaattaagctaatctaaacctgcaaaaaaggcgtacgtatggatgcatggatgcggttcgatcgtgttgcccccgtacggtttcaccacccgtcctgttttcctgcgtgtaaattgctcgccttttgcgtgttcttttcctgagaatataatcatgcacgcacaacgcctcgctttcccctgtgtaaattgctgccgcctgcgtcgtgtcgaccgatcgattgactttaaacaagaggagaattggagcgcaaaggcaggcgaggaagatggcagcagaagtggagtggcgagtgctgtgttggtgttgccgcctgcctggtgcctgccggctgctagatctggtctgtggtcgcccaatcaatctcccccgtctccttccctgcagattcccccccacgtctctcatattttttttgcccggtttctctcatcgctagctctcgcgccgtccgtttccgcgacgcctttctttttaacctgtggagactggaggagagcgctgctgccgtgccgagatgtgaacggaatcgcgatacggtgcaagcaagcgagtgcccccggtcgtgctcggctcgtacgcgcggacacgcgcggcgcggccggcctcgggttggacgagcgatgggtgcagcagatgttgtcacgcatcaccgctggatggatggacccagggggtagctgtgacgggagcaacgaataaggcgtgatgaaccgtagccgcgcaagcaattgcacaccggggttgttccattccatctcaacgtcattcaattttccccggattttctgcgacgtcgttcggttggtttggagcagcgccaccgctagctatacgcgccgggggccggccggacgtccggtgtgatgctttaccttacaccagtacaccactcagaggagaaaaaaaatgaattattactgtttatttatttattacctttatttatttctgaaatttgtgaggtgggtgactttgccgtatgaccagggtaagtggagggtgtaagggatggaatgtgtgtggctcctaacctagattcactcgagtaacacaaggctaagcttttatttttcttttcttgattacatgaaagacacatgtacagaatattttgcacgtacattacattcgcatcatgcacctgcaagagtgcaagggcatctctttatcacaggtttaaagaaaccatggttatcaataaatccctagcattactaaattcttattgaaagtgtagccttatacgtgtaagccattcccaacccaatgactagaatggtgtccatagcattaaataagctatcacctaagatgaaaaatgatgtggcaagtgaataaatgaagaaatagaagaaaaccatgtcttgcatgagacatggttcctacacaacatccaagatatcatgtgagataagtagcattaaatttaagtatgtaatagtagtgattgcattggaagagtagtgtctagtactagttttcttgatgatgtggagtttatggaaaccatgtctaatattttaggttgagaatggcctaatattcactagctaagttcttagtgggaaccacaaccatatatagattttgtagggcttttataccaattaatgaatcagttcaattctactattgttccaaagaaggcctaagattatctctggtagttcccaaatatccttctatcaaagaaaaaaaaaatacatattcaggatttcggtgtctaacagtttacccaataccttccactatccccaaaagttattgactcaataatccatctcaactccctcaaatatagggaaagttgcaactcccacataaagtagttgtctctcctattactgccaacatgcatcaccagctcagctggccgtcgaagacaccatgtggatcatctaagaggtgttgtctaaacctcagtggccattggccactatccaatcgtccacatgtcatccatcggctggtctatccgagccttagtgcggttctttcccacgcccttacttggccattgcttgagttccacctccccccactcccgtgattatcaacaagcctctgccgacaaaactttgtcgtcggcttggcctccttgagctctaactgtggtcagcccctgacgttaggggtctttcgcttttgctagatctctatagagatattacgagtcctccgtcccaaattcccttgccgcaaccatctggttcaccagtactatataccaaaaagtctcatgcttacgttactgtgactacacttcaccacacctagggcttgaccctgccaaaccctggaggagttgcgtccgatgcaccgccaccagcgtcgggaggtcctccatcactactagcaccatcaccggagagcagctccgtgcgagtacctcctctcctcgtcccgctcgagcccccatgctatcagatgtcatcactcgaagcctgctctctcatcttcatctgacatatagatctcattaatactgggatgagatattggatctatcaaaagcaccccaataaccatgaaattggtatttgggaatctccaataagccaattttgcagatgggatatgaatatatgatagtgggatactgttggagatgctcttacatattacatggcttataataacaagtttgaccaatttttaccatttgaaatcaattatacaaattttaatattgaaaatgtatctttaactgaaattagtgaagtattgtcttaaattcaaattattgacctcaaaattcaggaattctgatgaagtgccaaacacaacgaccaaaaggaatactccaaaaatcacttaaaaccttctagctgtgaggattatcgatcatgatcggcatgaccagcaggctgacttaacaacttggtaaattaaaattaaatccataagataaaaaacaaaatagcgagacatgcatggaaacatctctagtgtggacatcggtgctttggcattatcaaattaggtttgacatttgcacgcagaagacggctagacctgccaattaacaaggcacatccggatcccatgttgcaagcttgcaatggagaatacggttacagcttctttgagctgacgtgaacggtgttaaccatttacttctaaatggcgcagtggacctgctttgatagaactatccgcgaatctgaccaaaattaacctctttttttaaaacaaaaaatgacaggaaaacaacggatgtatcatgaatggtgatgatagctagcttggaaactggaataacgtttgtttgtcgggttcaaagaatggctacgtattgtggctagtgggggtatttctacttctctatccaagctgagaatgcgtacaatacagcgcaatcatgcgcgatatttgcctgcagatttctggtcccttgcgcggcttgcgcctaaaacacggccgattgtgtcgttctctcgcagaaagagtgagcgagaaattaaaccaaaaaacaaatgcaaagtgctgcatccaaagtagagtgaaaagtctaaagagacgcatcgatgttatcactatgggagagggaggttaagaatcacatcgctggaaatcactatgtatatatgcttggttgtcatatgctgtgtgtgcttccattgtcacgaacgcatacatgacaaaacatgacaagtcagcagtgatgacttgatgatggcaaggggggtggcacgacagaatcatgcccgctggtgatcttatcgacctggctggctatgggccacaacagttcacatctccttcgccaatgtaaaattagttagagttaatttgatgaaattgttgtttaaaaaatcatgagataataagccacaatatcacataattataattgtggatgtaacatatcatttatcacgaaatgacatatttaataagttgtagtgccatattagtacatagagtaaatgcattagaggttaaatccttaccaccaaatcgtagtatcatactacaacacacattaaatacttttacggttcttaagaaagcatctacataaatagacaggtatcaaaattttaatatctcgagataccaatgcaaattttacactagaaaatgtagtatctctagttgtgtatttgtgtgggaggggttcatagtccacttagactgtgttcttccccctactttccttactcacatctctcttttttcgcacacacgcttttcaaataactaaacattgcgttttttttttgcaaaagtttttcacgggaatgttgctttaaaatattaattcatttttaaggtattttagactaatacttaattaattacgcgctaatggaaactacgtgcggggaggtggagtttccaaaaccttatcattgttattataagtttataacatatctttccaaatttataagtgaaaaataatccgtgcaatctctagtttaacgatacaatagtttataacgaacttgatactgattttttttctatatcttttttcaaagtgtatataattatatgaaatttacttaaataagtatgattggatggcgcagtcgtcggctgttcaccatgttcgtgtgcagcagagaggttagtttcgtttttctcgtccggtagctctccatgccttgtagctatagctagcatccagccttgcttttgtagatggagcaaccctgtcagctggtgaatgttgttgcattatattgagcctaaatcaacagagatagatatataaactgtagttacggtgtgacttttcagggcaccagcctctcgtgtacttgtaaaagaaaaagacagactggtgtcaggttgcgcaattgcttattattcataatttcttatatcgctcatcagctttgcgaaatggatgccattagctttgcatttcaggaacgagttggatgcctcaactagaagttgttgctaaccacactcgataaggcacggcacttgcaaaattttcctgaagctgaaagaaagagtcagcacgcacgatcgccatcttctgagcaaaattcaagagcattcaggagaaaagaacttaatcttcattttcaagagaaaagaataccacctaataaaaaacttaatcttcatcttcagaagaaaagaataccacctagcaaagccacggatacagacgtacagagtatactctaccatgagctgatagacttttcttcgtggtaaacgaagaggattggcagtattattacttttaccattcaccattgccattaattaacaaaggacataagaattcccatcagcatctgaaagatccaaatgccataaacacgattttatgtaggggaccctaaaacagggataggcaagcttcatgtgacatcctttaataccaagaaagatcatataaaatcgatccaaaccaagtgaaatctcaaagaaagggagagctggtctgtgtgtgagattggtcagaggacaaaacaaaggctggaagtcagggagagggaggagaggagtaccaaattcccatgaaactctcaaccccaccaccctcatgcgcagtgcgtagtagtatttatttccccgtgctttaaggaaagaagagaccaaagagatctgaacaaagtgggggagcagcctccttacaggaaagaggaggtgcgagtgatgccatgacaatgaagagagatggtgcaacggcaactgaattatatactctactatgctcgtccaacttggcaggctggtgccaaagagtctgcctcatgcagtcctgctttcagatatcactccacccaaccaaacaagcaagcattattgcatctgccatgagaattttacacaaaaatgtcaattgaagtaccgaatacattcaggtataataatgggaaaacagcagagataatgtcagtaatatactccaacaactgccaacatatgcaggtggcatgatgcatctacttgaactgcatacatgacactttaacagcagtacaggaaccctttaattttaacaaaagattccaacagcttgattaagggatttgggcacaaggcaggtaaagtgcataaacaaccttcatttccaggcactaatgagagactttcgcaacttctcatgaatcatggccatcaccaacaccgtctttctcgctacttaatgctgtgctagaaccaaagcatatgggcgtcgtcagaggagagctcctttcctttggccccaagctcacacttctccatgccatgctctgatgctgctcctcctccccattgtttagcccacctactcttctgtagtcctgttgcctccattagcaattcttgtctccgttttctttttttccatccttttcttcttttctttctttcatatcctgctcagtcctcaccttcttggttggataaacatgctaacgtgcagctagctaatgtgttttggactttaattattatagtaagtgatgctacgggagactgatgagtgtttcctggaggagcaccaaaccacaccaatcgccatcacatgcactgcctttatattattacactcttctgatccttctcatgtgagcagtgcaaaggccaccactcctcccttctctggtctcaacagctgcacttgtctctccaatatttgcttcctattccctcttcacgcagcaggacgcagtgactgagactgactcctcttgtatgtgtgcaatctttaagaaataggagtgtatctctctgtatgtgtgggtgaaaacatcataagtgagtgactgcacactgcaacaaagctgatgaatcagagattcacagctacactctctgcgggtcccaagctcatgttgcctcaactaagctaaatgcaaacccgtggcttagcaaagtggcattatagacatgaccctgaaaaggttccgacagagatgtgtatatatttatcctgcgaggcatgcatgccttgattgctttacttctttgctccataaaccctgataataattcagattttcactgttccaggcagcattgctgtcttatcttgatcaccacttttactatagccattgagcaaagtaaagcaagcaacaaacctccatgcctaacagcattaaccaaccaagctagagggatctgtagagagagcatctgtacctgatcggcagtggcattggcatgtgcatcggcccttccctatgctatgctgcatctccatatcacaaggttccttcccccatcatgcattgggtctctctctctctctctctctctcgctaggccagctctgaccccagatttgtttctaccacgcagtgcagcggcagcggcagctcccacaccattactccccatctgtgtgaagtgagagggaaagagacgagtcagatacctaaaattgtgatggactgatattattgtcaactaacgtgtgcccccctggctggcatgcccttccaaagggtcggccctgtgcttgctgctttgcccatctagtccacggcagcgttgcactgtcttttgatgcccaccctaatgggagccaggataccgaggccggccagcccagcaaccttactcactcatcagtcaccggctgatgcaaaaacatgcagcaatagggacgctgctggccacactgctgctggttctagcctggactggactctggagaggaaaaaagagagaaaaaggattgcatgaacgggtcgccattgtaggcaggagtttaatttgtttggattttgcgaggcacgggctgcagcaaggccaacctcttcagtcctctccaccccacttcttgatgacagtcacatgctcttttttaaatataaattatgtttttcaattcttttcttatcttttgaaacaaatgttttctgtttttattttcaccaggcatacaaagaattacactttggactacctcgactctcttctcaagcgcatcgacgactttgagtacaacagctcctacataccgctgaaatcccgcacaccgatgaactccaataccgcagctagtttgaaataggatgaaagaaagtttggatgatccgataccgtagcttctagttggtcaaatgttagcaccataatcacatttcgtccattgcagaaaggatgattttatttttgttagtgctgtccacccattagaaagctccataaggagccagctagacaattattttgcaacttatcgtgttgactgcatctttcatgtacttgcccccttagcacaagatacaacctaatcgaaccagcatcttgcgtcagggaaagaaggatcagatcagtttgcttcagcctagtttagacgctaagaagagaaacctaacacatttgatggcagttagttgaatgcaggtacatggcttcatgggtcctaaaagtaatgaagcctagttgaatggcaagaatatataaggcacaaggctagaagcccattataagactgccgcgaaggggatgctttgctcaatcacaaggactaatggccttgtagactttgcaggtaagcatggacaaagaaataaatatatatgtttaagatgaatctaatgctgcattatggtactaccacaggtatgcagaagtactaacaaagtcatgccgcaaggcccactaatgtccgtacacgcttaatccaactctgcaaccttatgatagatatccactttatggatctcttctacttttccttccattttctttacatgtattaagtagatatttcaaaataacatgtattaagtatacgtatacgcagctcaaagaaatgggtcataaacaaattcagagattcatatattgatatactaatgagcaaccttcgtcatgctaatatggtaatgtaataaacaccattgctcttcttatcttaaggaagaagcataggatgcatcaagacgcctgcagatatatccatcagcattgttagatgccaccgagaaacatgaagagaggaacaggtgcacgataagagaatgggaataaagctggagtacagacgaggaaagccacaagcaaagctcattggtttcaggggttatacacaaccagtaggaaagtggggatggtacctcctccattatagtcaggacacccacaaatactatctaggatccttaaagaatacttatgcaatacagccagcagcttagagattagcaccaaatggatgccaagtccattcctttggtgagcatgatgccaccaagagaggctaaatggaaagaggaaaaatgaaggaaaaaggaggcatcatggaaggaagctttggcaggtaaaaagaagggagagaattgctccacaggcatccatggtgggtttgttacatccttaagttgggtgagtaagaagatgctgaaagcaaagcagatggcgatgcatggtgctcagtaccgactgccagatagcaactgaagtttctcttctttcaagatctcaagttcagctgtgaccaaagcattttccaaaccaccctctgttgcccccattagaaaaaaaataaggttggatactgcaagagcaaagcattttggttgtaaaccgacacatgagaaatgcaagatagagatgtgcataatgagtcatcctctccacctgtcaattacaagacgatgtgctaatggccaagtttggacaagtcttctacaaagacaacacaacaaataccagctatttaaagtttttttttgaacaactcgcacaagatggtgcgaagttctattgatagagcagaagaaaaattacaagattacaaccccgtaagatcgtaaccaggaaaagaaaaaaaagtataccaccacccacacgtcgacagctccaacacacggaaccaggagaagcctagcaccgaattggccgccgctaagctatttaaagtccacctatactttctacctcggtatgcatttcaaagtatattagtatatccaaagttaatgaagttactggcttgggcatttgtttctaagcatgtccacactacatacacaagctagcttttcacagaactggaaaatatatgatgaaagcacttacatggcaatgctgtggcatatagctttacctcttgctagtgctcaagaccaccacggtagcatattctgcacttaaaaatattcataacacctgttgcaagatgtcactaaccctgacctcaagattttttattttttttggagatgtactgcatctactcgtatttcaacggtggcgttcgttttcagataaacaaaataattagctagtgcgagtaatagcatcctacgttaacccgtgacacattttaaaaagacaaagcacttcctcgcaaaacgcttgctgcagatatgatgtccagaaaaatcatatccggagcaccacttgccgcttgctccaatatatgtcaatctgccgtcccctaccatgccaccacccgtcaatctttccaaatctaaaagtttggcaaacgagagagatagccagacggaggaggaccttggccaaccaaatccaaacaaatttggaggatagaacaagcaaaagatagacaacccacaaacaattaagaggagaaacattagccgtaaaatactcccatttgaaaagtactactataccaagatggagacgcagcttactttgcacgcaagtatatggactctggagtgaaaatcgtggtgcacggacaaagaactaaccggcggcgacaaattcttacagtcaagttatcattggcattgcagagggggaaattaacataggctatcatgggagtaacatgctaatcgcaaaggaaccgcactaattccgaaattggcaaactgcacatcccgtttcaacctagcttggcaagattaattccataattttgcacgagacagcggaactagaagaaacggtaggattagggctttttcccaattcccattcgataatcaaaatcgcccatgtcggtgtctagaactccataagcagcagacgagtactaaccgctggggtgctgatcacggcggcgaggggaagagaggcgcacgcggcgacccgaaactggcacgccgggatcggggagaacagcgccgccgtcgagatcggggaggacagcgccgccgtcgacgccccttcgctcctgcatctccgcaccggcggcctgtacccggactatgggcttgcgtggttgaaggaatagaaggccgaggagttggatctgcaatctgcaggccgcatgaaaagtgggaagtggctctgggcttttggatttgtttacgtatgcatctattgggctatacgttgaggcccaatgggctactatgcatgtggaccgttaggtacgagtttttctatttttacattttttattaaaaatatttaaagaataatttttcgtttcgaaaatttaccaatacgcttcacgacagattttaagtgacaatgatagccagatgatctagcgagtacgtaccgatattagcttgcgactgacctatgggcaaccgtacggtgcgagcgctcacgatcacgagcaacgacgataccaccatctacggtaccaaatgtactttattctatactgtaccaaagtagttctgcacttcacttatgcagtatgctgtgtggggtctagttacggcgaaacgtgcgactcgcacgtaactaaagaaatttgcatttgaaagcaagggggtcattaattaggaactttggtatagggattttatagaattaaaaacccctttatgatttttttcccaatatattccctctgttccaaatataactatcattttactttaaatttaaatattttagaatggagggagtagctctttagtttatagaattttgtttgaaaaattcaaaaagaaaatatgttcgtcactttttggagttcgtcgaatatgaacttactttctcaatctcaaaataaatcaatttgtatataaaatctggatggagtaaaccaaattgtattgatttcctttgagaagtcgaaggaaccatgtcttatcatctctcctcttaattctattcaaacaatattttctcattaaaatcatatgattttcataagtcaagtactatttctgtcccgtaacttcttttttagtccatattgcacgtatcaatacaaaactaaaaacactataatatctcactttaacaaacaccaatatatttcccatccattctagcaaacattaatgtgtttgtcccattttaataaatccctatgtatttgttttccactttaacaaaatcgaatgcactgactgttccaaaataaaatctttgtggaacaaatgaaaggggaaataagtctactttgatttttctggacgagacattctttatgttacaaaaggggcccctaagatgttcctgtgtgcaaaaatgcatttttctcatgcgtcctcataagagacccacctacaaaactagacttattttattgggcgggcttcttaggtggctgcatacgaaaatcagattttcataggcgctctataagaggtccacttacaaaaatcaatgtgaactaaatataaaataccaaatcctctccactcctccacctcccctcttatcctctcatcctccacactctctctctctctctcacacacacacacacacatgcatgcacacactccctctcgtttgtgcggctggcaacgcaaccaaggcaacagcggcgggtgggtcggtgactggcggtaggcagaagtggctggcgccgagctggagtggcggggagcttgatgatgatggatccggcatggagaatggtgggagtggaggtggcagtctcggcctctcgggcacggtagcggccttggactgggcggatccaccacttgcacccacaagagtggcatatccgcccccattcggccagggatggtaggagcggcggcggcgatttcggcagcgacaatgatgatggtggcgtcgacttcgggagggacgggaggtgtggatctggcggctcttcctctcccacgcagatcctaccacctctccctcacgcattgctctggcgacgaaccttgggcacgggagcaatggcgacgggtgatggttgcttgacatgggagctgctagggtttcagttttttttttaccgatttttctttttgccggcggatggcataacatcccgcatgcggaaataccctttttgtgtgtagttgtgcagcttacctgcaaaaattgctatttttatagacacatgaggtgcagacggttgccacatccgcctatgaaaatatgatatagccatatggaaaaaacccattctctctttccggatggagggaatattaaaatgacccattcaactcattctcgtgtttttaataattcctataagttgacaaatggtgtggcattcaatttcggatggctcgctgcccccccccccccgggccgcttagcatcaagcagccaggagcgctagagcgtagtcgtattgttcccccgagagaaatttccggtgcatctcagcttatattttacaatataaaaatatccatttagggtctattcattttggataaattatttctttattctaacatataggaatatgaaaagtgaaaaaaatagaaatgcatgcacattttaacccataggaatttccaacaggttcgagtggatgaaaatttcctatgtttcctctcttacaagagaaaatttgtatttttgtatttggttttcctatacctacgttcctatgaaccggatgatgctaataggaattaatccttagcaatctaaatcatttggttttccttcaaaatgaatgggcccatacttttgaatattagtaggaaacaggaacgctgaagcagtcttttagggagtactccactataattgttcctctatagtccccttctttcctctccttccttctaacggaatggtaaaattagagtgaactgaaaagatcgagaattttggttaataattccatctgaggcgttggatagttgaaatgtagttatttggttaatccaccacaaccctcagttaatcaaataggctaaaattcggtccaatagacttaaggccaacaatctcaaaaaactatcattagcattctccaccgcacaagccggctgatcacgactatcctcccatccgccatatccggcgctgccatcagccgagaatgctaatgggcgactagtcgcctgtggcccgggccgtgcgaccagttccactcattccatttttggctcaagcggttttctgcttttcctttttcttttttgatttttctcatgggcttcattatttagcaggccagttcaattcgttcaaccagactgatcagactttttttttcttttttagcaagccactcctattcaaccatgtgtataaagtttgtatataaaatttatacataaatattctatatatacctatataaatgctatatataagttgtatatatgtctatatatatactttgagggaggggaactaacccgcatggacgcgcccccacacgacacgaccaacaactaatcagcggttgccgcctccacctctgttcgcccgtgtgctacggtcgtcgatgctgtgcttatagatggccataaggcccgaggcccgaaggcccggcccgacttgggtcaggcccgtgccggcccgacctccgggccgtgcctgggcctccccaccggcatgctgggctggcccggcacggttgggccggcccgacacaatgggccagcatgccaggcccgacatacaaagtatagggactaaaaatagactaaatgtcactgtccaaacaatagggaccttaaataaaattattttagctatttatatatcacagcccaaagaatagggaggtaaaatagacttttttaggtatatatatgtcacagcccaataggagggaggaatattagacttattgtgagaaaaatcacaataggccatcgtgccttcgtgttggcccggcacggccgagtcgtgttgggccatgcctgggccgtgagtgcggcacgtgggctgccacggcacggcccggtgcgtcggtcgggccgtgccggcccgacaagcctcggcccaggcacagccggcgtgccaggcggcccacatggccgtctatagctgtgctagcctctcggccacccaccgccaccagaattttttttatttttaatttttttattaaaagttttacaaaaataattttccattttgaaaattgacggaagtggtcgcctaccgccctctgggagggcgatttttaaaaatcgccatcccagagggcggcgaaaatgacgtggcagacggccgttcgctctcgggcgacggccgtcaacgaaatttgcaggcggcccccttgctgccctccgctagggcgattttgtactgtgcgggggccgcctgcaaatgggcggcgagggggcatggaattttgcaggcggcccccttgccgccctgggggagggcgatttttgcctcccccctataaagcccagtcccccctctctgaaatttcattatattcactaaaaatccaaaaaaaacgaaagagagagaggggagggcagcagaaggggagcggcgaagccctgctggttcgctcacttcatcacaggtttgctcccatacatcttttgcatttgtactaatatgttatgtttgagtatatatgttgcgttttagttttagttccatatattttagcatatctgtagcacacagcacatatgtgtagatccagagcatagaatataatagtatgaattgagacatagacagtagtgttaattgtaagatgtagtttagtttgatctggagaatgtaacctacttttagaattttggagaacaatattgtagagaatgtaacttagggcgtagtacagaaatgcgaggttaacgcaattattgttttcatcaggcacaatgtcaaataaggtcacatttcagatagttcacggtgaaggaaatattagatttggtccagatggtgttgatctgtcagattttgtaatgacatctaagggcatcgataggcctgcggagagaacatttcagtcaatttatagttggttgttgagaggatttagaatagaccaagaagtctacacaatgtcagtatcagttgtagtgagtcgtgcaacagaaggttatttttgggaactaatgccgatggacagcactgctgcttggagacggtatgtggaaatggcttttgaacggtcatggcccctcgttatatttgtgtcggtacaagagaaagatataaatgtttcaatgcaaaccgaagatgtagagggtcctatcaatgcaggggatgttgttggaccatcgatgcaaaatgaggaaaatcaaccaagggaggagcaggccatgggcatggcggatgagggggagagagtcggtataattgttgatgaaatggagagggaagattcggataatgaggaagcggacgacgacgcatcatccgatgaggaaggtgatgtaatggccactgattgggcaaatgaggacttctctggacttgttatatcagagggtgatcatgtaccctgggagtataaggagaacgaggtaattgacggtgcaaggtatgctcataaggatgagatgaaggaggcggtgaagcattgggcagtttccttgcagagagagtttagggtggtcaagtcaacaaattatgtgtatgaagtgaggtgcatgaaggaagattgtccgtggcgtgtccatgcatataagggtaaatggaatgattattggaaagttagcattgtgaccgagcacaagtgctacttacaaggggtggagaagtatcaccgaaacatcacttcagcttttgtgacaagtgagatgtacagcagtgttgttggtaacattggctttgaaccaaaatcaattattaggcacatcgataacaaattcaagtacaccataagctatgcaaaggcctggagagccaaacaaaagattattgagatgaggtatggcacatttgaagcttcttatgataatttgcctcgtttgttagccaccattgcccagaggaataataatacttactatgacctacatacatttacatcggttgatgatcgaacaaagagtgtgctgcaaagagcctttttctcattgggtgcttgcatcaatgcttttgtgcattgtcgacctgttctatgcatagatggaacttttatgacaggtaaataccgaggtcagatattgacagcaattgggtgtgatgggaacaaccaggttgtacctatggcttttgcatttgtagagagtaagaacattgaaagctggtactggttcctagagagagtgcacattgcagtggtgcgtatgaggcccaacgtttgccttatacatgatcgtcatgcgggtatgttgcgggctattgactacttgcagaacggttgggatgagaagggacttccagctaagtggcctgatgttcggagtcggtggtgcatgcgtcacatgggtgcaaatttctacaagtaattcaagaacaagcatcttatggagctctttaagaggttctgtgcacagaaccaagagaagaaatttaatgagttgtgggacaagttggatgagttgacaacgaagcaaacagatgagcaatctcgcagaccacaagttgaaggtgacgagcctcccatacctcttggcgcattacatgatgacccaccaacaatgagaaggaggtcagggtcgtccatcagaaatttcactcagtggattgagaatgagcctaaggagaagtggtctctattgttcgacaccgatggatctcggtatggcataatgacaaccaatttggcagaggtgtacaactgggtaatgcgaggagttcggatacttccattggttgctattgttgaattcatccttcacggcacgcaagcgtactttagggatcgatacaagaaaattggtccgtccatggccgataacaacatagtgtttggcaacgtagtgacaaagtacatggaagataaaatcaaaaaggcacggagacatagagttgttgctcaaggcacacaagtgcatcggtatgaaataatgtgtgttgataggagcaggcgtggtatctatcgcaagcaagccgtgcaggaatgtgtcttgaaggcggatggtggatgtacctgcagttgtatgaagccgaagcttcatcaccttccttgctcacacgttcttgctgctgccggtgattgtggcatatctcccaatgtgtacgtctcaaattatttcaggaaagaagcaatctttcatacatggagtgaggagatatatgggttcgggatctcaggatcttacacaacactgagtgcccaagttttttacattccagatccatctaagttaagggtgaaaaagggtcgacgccaaactagacgcatcagaaatgatatggatgagtcagaagcaggtgggaggactttacgctgcagcaagtgtgatatgcgcggccaaacttacaagaaatgctcgaagaatgcagaagttccaagcggcgcagatgctagtccatctggacaggcaagtgatggtaggcgaccacctggtccagcaagtgatttgcagccgggatttgcagccgggatcttcggtactggggcctcttcgtctcacgccggtaggactggtcctactagccagttctacgacgacgacttgcacggtgcacaccaccacgacgtactaggctcctctcagcttggaggagctccagaggcgcacactcaggagcagccagaggtcacacctgtacaggcaggacgggttggccgtgccgtacccccggaccgactcacgtactcccaggggcacattagggcgcagggtaggagggacaggggtaagaggcctcgtcagtagtgttctacctcttcagtccttatgtgaccgtttcttttggcttacaaacttgtaaagcagtactacttttgctattactactgcagtactacttgtgtttgtctcgtctacatagttcttttcattcatatggtgctagaacaacttatgctcacgacaacacactttcggcgcttcacggtagtgtcagatccagtagcgcgcacagtccacaacagcacacatgaaaagcggcagctcgagttgtcactatcaactttcggcgctgcctgttgacataaagtgaatcacgcccacgcgtgatcgtcttgtcacatctaatgaataatgtatctcattgagttcacatatattgcagtgaaaacgacgctatataattgacaatctgaaggcaacctctttatatcttctttcccactagcacacaacacacgaaaatggaagcgccattccttgagcgtctcaactggcgaagcgatccttttgctggttggtttccaccatggtgtgaccgtcctttgtgcgattgtggggatggatgcatactcaagtcttccctcatgatacaaactcggggcaggagattcttccaatgcgcgaactttgatcaggtatgcttcatctattcgaagttcaaatggataaaaaaactaacttcttcgtacacaattgtaacatcttacgcagacatatcgtccaatgtgcaacttcatcgagtgggtagacatggagaacccacaaaacgacggaacccgtgcttacccacgtagtgaaacaagatcggactacctaaggtggaaggatgagcatgaacgtcgaattgctgctgaggctttagaatggcacgtaaatcccctaggactccccacgtggcgtgagcgtccggagtgtcgttgtggtgaccgttgtcaggtcataaggtccgtaaggcaccgaactcgaggacaaaggtgtttcgtgtgtccaaatattgtcgacgatgatttcgtggtaattacaactattcttttcatcactcctcagtactatcattaacttaactatcccaaaatggatgtacataggaggatgtaaggaaatgtcaattcgtacaatggattgacacagtcagagttacttcaagtggcgggccgataacgcaacctgaaccgaccatacagttcattcatgcttggatggagtacgatcgggtggaaattgcaagcttagactggaggaacaatccattagggttacctaaatggtccgagcgtccaaagtgtgggtgcagagatcgctggcaggtggctacatcctttgctgaacaaacatttcgaaggagatattttgtctgccccaatgtagacaacgatttcgttgtatgtctaaccatttacaaaatccgctatgatttgcacaaaattactacccaaactgaataacattactatttttacagggcaatccaaggatgggtggatttactcgatggatcgacaatgtcactctatcatatcatggccagaagataacagagtcagaaacacaagtagagtatcaacgattgaaggaccacgagaatgcaatgcattctgaccgacctagaagatgccgataggttaccgcatgcttgattcgtcgggatcgacaaatttgtaccgtgtatcgatggcacttcttatctatcttatcattacaatgtttaattatggtggtgattttttgtatgcgtaagactaagggcctatttggattgctaccaaaaacatgccctaccaatattttggtaatttgaatagtacttgtgtttgatttcgattgaagcttattcattagtaatacgtaatctagatttgagattatgtagaacattcttcactacaattttacattttggcagcaaaccaaatatgatcaaatgcaattttaccttaccaaatatttggtagtgccaaaacttgcttatattttggcactaacaaaatatttgtacggtaacattccaaataggccctaaaaaataataaaattgtattttaccagtcttggagattttaatcttgtatagttttcaatataaaaagatttgataactattgatatttatacaaaaatataaagcaagtataaattcgccctcccccagagcggcaagggggccgcctgcaaaattccaggccccccgccgcccatttgcaggcggccccccgcacagtacaaaatcgccctagcggagggcggcaagggggccgcctgcaaatttcgttgacggccgtcgcccgagagcgaacggccgtctgccacgtcactttcgccgccctctgggatggcgatttttaaaaatcgccctcccagagggcggtaggcgaccacttctatcaattttcaaaatgaaaaattatttttgtaaaacttttaataaaaaaaattaaaaataaaaaaaattcccgccaccaccagtcctcgcctcctcacctccttcccttctcttagctcgaactggcgtacttatgccagcgcatcgtccccttctccctgacacgcaagcacgatgttgcatcctccccaatgggcgatggcaacttaaccgagcaatggttccccatctctgagatttgtttgtgtgtgtgattttttttttggatccgctgatttctttggtgatttgtttcgatctcctaaaatttcggtcataatcaagattgagagcgaattacttgcattggtcttcgtggtaattcagtctctatttttacatgactgaattcctgaaaagactgtagactgcgactgatgtcatcaatctaacttaatatatttaatttttaaatagtgggttagttgtgctacaccgctactccatccatcctgaagagcatggctaataatatagccaaatgcttgctggttttatagatctttacagtttaccgctcagccaactcgtatagtggttagctcttaactataaatatatagtctatatgtctctctcatatattttcttggtttctgtacctatgccggctataaatatatggccatccgcgcctctctctcatctcctctcttctctcatccatctatcatttagccttctcacaatcttctattagtacttgcttgtaacataccgaaaactaactattttctaatcctgcatcatgccgctttttatgttcttaataacttcctaaacctaggaaaatacaattagagggaccttctaaaactaacttgcataaaatctctttctggtatttaacttcttttgtgtttttcatttaaaaatatagttggttaaattaaggtgtttcttgatttggttttaatttaaaaaccttctttagactaagattcttttattcaaatttagtttgaaaactctttctatttttttatgaattatggtcaaagaaacattcccatactgtcctagaacctaaaacaaagtaattccaattttattataattaattgttagcccattctttgttcttaaacccatcctttgattctcgatccaaatgtccaaattcctccttttgatctagccaccaatttaattcctgtggcttgatttcctcttcggcacaagaatagtattattgtaaatattgtgaataattgctcttgtgctaagaaaatagcaatttatattcttcactcaactttccctattagccacaaataattcttcaaatacttctactatcaaatttaggattcaaatcctatttattttacctccaaccattctcctccaaacatatatatacattgaggaattatattgttaattcccctctcatttgagtgcattaaattccaccatattccacttccaaaaatattgcactcaaattagaaaatatctgttttggaaattagatccaaatataatttcctttcaaccttccctattcaaattatctccaaatatattttcctttcaaaatcttctattcaaatccctttcaaaattgagaaaccaattctacctaaattgggccgaaattctttttctccttcggcccaagccggcccaatacccagccgagccgccaacttgcaccgtgccgtgttcgtcctccgccgctgctgtgccttaccctcctcctccgccgttttctccttctctaagaaaccgtcgccgctgccctaccgtcgccgccaagtcgcgtcgatgctgtgccgtgttcctccttccccgccgcccaactccctggcagccgacgtgtgtgcgcgccgccgtcgacatccaatcggagcacagagccgacgccgtcgttttcttttccacggcgccgtcacgaagttttccttgatcttcccctctggaaccgccttgcgccaccgccttttgccgcctataagtattcggcgaggctgccccttttcccctccacaccatcgagctctccgagctccttctctctcctggccattaccggccaccaccatcattggctgatctccctcaccggagcaataccggccaataactcgcgccatcgagatttcctcgattagaggattccatttttccccttccccccttcctccacctctgaatcaaacctcaccgaagctctctctctcctcccagttcacgaccttgcatccgccgttccggccatttccctcactccctttgcaggacactgcccttcctaggtgcgctgcactcgggaacaccaccggccgccggcgtcgttgccttccggccactggagctctggcgcccctcctctccctcctgtcagtttgctcggcagtagaaggaagaggaggaagacgacgggaggaagaagaaaaggaaaaagaaaagaaggcagacactgacaggtgggcccctgcacagtaactcttcgtattttctctatttaattcaaatcctaatctttagaagcccatatctcctaaaccgtagatccgattccattcaaacttggacctaaattcatataaattcaaaatctatattttgataccaaatttgctattttaagattctgtttgaatttccttaatttattcaaatactattagaataaatatttgattaaatcttacaattgaatttacaacttaaatttatatttgcttttcaaatattttattttattccaaattacccctttagccactaaaaagccgccggttggaactttacgccttccatggggatgttcgcggtttactatcctcgacgtcggaccgttggttgtaaagcccgacaaaaaccaaacctaaggtcgaagtgctgctcctagcaccccacgccttgatgcgtatagcggtcggagcttcactattccctcgacctccacagcacgccgcacagttagctctcgggctcttttgatcttagccgctccgccgccactcacggttgtcggagtaacacttccgccccaccaaacctacaccaacctcatattcctctagccgatatactgtcggtcgacaccggctagagaagacactaaatctagtcattatgctgccaactctagcaacgactagcaaacaaccaaaccctagccgataccttgctagtcaaatcccagttgtcatccaaattccatactgtcacgccccgaactagtaccgaccggaactagcccgcgacgctccaaattaacctgttaattgataccagtcccaggaaacagtgctggtatcacaggaagacagattatcacagcaacagaggtctctttattatagagtagaggtacagtcatgttgggccgcggacagatcccgagctcacaactgcattacaaaagggaagcggaagccaggacttggaccaaacaacacaggcgcgacttgggaactaggccgaaaccctaaaactcatcgtagccggcttgctcctggaagaactcctcatcagcaggatccgcttcatcttcttcagcaactgggggggattatttatatagagcaagggtgagtacgggagtactcagcaagccatgggaaataagtgtttaatgcaggctacaaagaaagggctgctgtttttgcaattgattttatttgaactcttttctgaaaacaactaagtgagtgcttctcaaacgacacggatgagacagtgcgtctcgtccggtcggagtatgtgcaatgtatcagtctttagaattggccaagattggtacccggccaacatctttcaaacggccaaccgggccaacaactttcaaacggccacccgggcctagctgatcccatcagctgtagatttctcaaacatcgatcccctttttcacaacggcaatttcacaaggcagtagtcaaacaaaactacgctaggaatcacctcacatccgcccatgaccgtgggcacggctgttcgaacagtttgttaacctctgcagagggggtacactttacccacacgacattactaacccggatcacccagcccgtggggatcagccacgtcgggagacctccaagctttcatgacaaggcatttcgaaagccgacacaggtttaccatatgccgacgagaggggtcccagaccaacaacaggttaggtcccagaccatactgtgccaggaagcccaggggtcctccccgacaccaccccggcgaatccacatgtttctcggcatcaaggctcccctgataagctagttactcagccaggggtgtcccattccacccatgtggtcgtacttgtcttatgttcggatgaaaatccaaggaaacggtccttaagtgcaagagcggaaaaccgtacacccggtacgttccccggtccgcggttttggaaattcatttagttcgcaagcaccgacccaggtgtcgggttttccaagtcttttgtaaaacccaagttttacccaagttgtttttcaaattttaagtttgaaggcgaccgtcgatactcgcacagagtgcacgaatatcgaggcgcaactagatggttacaagggaacatggtataacaattaacaaaggaaggatcaaatgcaacaaactaggtaggtccgccaatctgccttgtagacgggacaaacagattaagtgcgatcctatcaatgcataatatttttcaagcaacataattaacttcaaatataggctcaagatgttcaaaggtggcttgccttgctcgagatcttgggcttgatcctcgaaatcctcgcactgcgggtcttcgggctccgaaactacacgcgaaacgggacaactcaacaaacggcgaaaataaagccctattaatgacctctaagcgtgccattagatagatctcgagatttgaggaattttggaagttgaacggagtcaaacggatttacggttgggaagatattgaatttctaagattattggatttttggtctaaaggaaaagaatttaattaaatcctttttgaaaaagaaaagaagagggggagggaaattagacttttcctcgggcggctagggcgcggcccgagagaaaaggggcggctcagccgagctaaatgggccggccggcccaaggcggcccaagcacgcgcgcgcgggaggggaggagagagagagccggtggaccgggctcacctcgtgtggtcccgggtgggacccgcttgtcggtgacacggttcaccgtgcggagcgagcacgcggcgcacgcgcgctggcgggggagggacgcggtgcacgcgcgcggttcgcggtggaacggatgcggcgggcccacgcgcagcctcacggcttgcggtggaacgcgcgcacggggaggggctgaccggggtcgactcgacccggccttggccgagttggcgccgacgcggcgcctacgtggctgccacgcgggccggcgggaggtagacgacgacgccggccggaacggacggcggacgacagcggcgagcggcggagcgaaccacggcgatacaggcgaaagcgagcacaccgggtggttgcacgagacgaggggagacgagccaacggctcggattcgccggagggagcttgacggcggcgaatcgcggcggcggcaaccggcggcgggagaaggggaaaacggcgacgaggtcatgaggggccgattcccggcggcgagagcacctacgcggctacgggaatccgatgctagcgttggattaggaggaaacgcatcgggggaggccggcgacgagaggcgcttccgagctcgggcggcgacggcggcgagcacatggcgagcggcggcaacggtcggggcggcgccggctagctacggggaggctactcatgctactacccgagtctaaggggaggagatggagcgaggagggagaacggggagatgcactaccgtgcgggcgaggcgcagtgacgagaggctgacggcgcgggagtaatctctccggcctcgggccggggaagaggaaggagagggcgcgcccggagtccccttccgcgtccttgctcgtgccggctcctccgacacgcgcaacgacgaacggcgacggcgaacagagcacgggaggcggcggcaatggcgtggaggcgaatgggagaggaaaggaaagggggaggcttgggtttataggatggcaatgtcggtttgggaaccgacttagggcgggcaaaggagagggctagcgctcggcggtcgcggccaaagcggcgacagggaggagggaggaggatgacgccggcgggaggaaaaaggggaaaagagggagaggaaagagggcttgtcccttgcctcttcgggaaaaggacgagggagcggaggcgacgcggcagagggaggaggagctctgcctctgtcctttggcagcttgcgcgcggagtggcggggccgagacgatgacgacggcgatgacggcggggcggtgtggagcggagcggcgacacgggcgacaggcgcgggcaggcgcggcagaggctgacggcggcggcgaccaggcggtcggccaccacggcacgcgcgcgcggaaagcaacgggcggcgctgcggtttgagcggcgcggctcgggcacgcgcgctggcttgcggggccgagcagctgcgcggctgcaggtgcggcagggcagcggggccgggtgacgcggacggcgcaggcgcggcacgggcggcaaccacgcgggcgcgcgcgcgaacaacggcgcgcgggggccgacttcgcgggcggggagctcgccagggatggagacggggagagggagagcgagggggaggcgctcggcgcggcgcagctcacgcgcacgcgcgcgcggcgcgcgggcggagcggaagagggagggagagagagagagagatagccggggagggagggggagatgggccgagagagattcggcccatcgaacccgggggaggcaaaatagacttttgcggaggaattgatttgggaagggtttggattcgggattgaactcgacgatagatcggggatttgagatctgagatggcacggacactagacaacaagcaaagaaacaaatttcgcaattagggtttttaagagataattttcctgctaggcgccacgacggaacgggcgctacagaccaacccccctaacaagaatctcgaccccgagattcagcacctaagggagcagctccgggaactcggcgcggagaagatcttcttgctcctaggttgcctcatcttcagaatggttgctccattggactttgtagaacttgatggtcttccttcgagtctgacgttctgcctcttcaagaaccttgatcggtctttccttgtaggtcagattcttttccagcacgatattacccaggggaacttgttcttctggaacacggagacatttctttaactgggatacgtggaacacgttgtgcacatctacgagaccttcaggtaactcaagctgataagccacttcgccacgtctggcggttatgaggtaggggccgatgtagcggggtgctaacttgccggacattccaaacctcctcataccacggaggggcgatacccgcaggtacacatgatctcctttttcgaactcaaggtcacgcctccgattgtcagcgtaattcttctgacggttctgcgctgtcttcaaacgttctcggatcagcttaacttgttcttctgctgccttgagtatgtcaggaccgaataccagtgcttcgcccacctcattccagcacaagggagtgcggcactttcttccgaacattgcctcattcggcgacatctgaatgctggcctgatagctgttgttgtatgagaactccgcatacggcaaacaacaatcccaagtgccttcgaaatccagggcgcacgcacgcaacatgtcttctaggatttggtttaccctttcggtctgaccatcggtctgcggatggtaggccgtactaaaatttagatcggttccgagggcttcatgcaactgcttccagaaccttgaggtgaactgagtgcctcggtctgacacaattttcttgggacagccaaatctacatacgacatgggtcatgtagagttctgctagtttctttccatcaaaggtggttttcactggcacgaaatgagctgatttcgtgagtcggtccacgattacccagatggagtcgtacccgctaggtgttcttggcaaaccggtgatgaaatccattccgatctcttcccatttccactcgggaatcggtaggggttgcagcagaccagctggcctctgatgctctgccttgactctttggcaaatgtcacacagggctacgtattctacgacatctcgcttcattccggcccactagaagtatgccttgatatcttggtacatcttcgtacttcctggatgaatggagtaggcggactcatgagcttcctttaggatgagatctcttaactccttcttggccggtacacagatgcgtggaccgcaccaaactgtgccttgatcgtctatggagaaatcggtgtctttcttctcttgtattctttttattaattcttttatcccttcgtcatctttctgagcctcccggatttgcgattctagggttggctgcaccgtcaagctggcagggacacctgactgtaccacggtcagcctcaacttctccaattctctgcacaggcggtcttggtcaggccgtatttgagctacattactgtaggccttgcgacttagcgcatcaccgaccacattagctttaccggggtggtcatgaattccaagatcgtaatccttgattagttccaaccatcttctttgcctcatatttaactcggtctgagtgaagatgtacttaagacttttgtgatcggtgtatacttcacatctgttcccgattaaatagtgcctctagatcttaagagcatgaaccacggctgccaactcgagatcatgggtgggataattgacttcatgaggcctgagctgcctggatgcataggccacaacctttcgttcttgcattaggacacatcctaagccttgtcttgatgcatcacagaagatctcgaaatcttttcggatatctagcaaggtgagaactggggcagtagtcaaccttttcttcattttttgaaagctgtcttcacaggctgcagaccattgaaatttattttccttctttaacagctcggtcataggtctggctagcttagagaatccttcaatgaatcttcgataatatccagctaagtcaaggaagctgcgaatctctgacacattcttgggtgggttccaagcaagtacagcttcaaccttgctgggatctacttcgacaccgttggaggagatcacgtgtccaagaaatgctactcggtctaaccagaattcgcatttcgagaatttagcgaatagttgatgatccctgagcttttccattatcagcctcaggtgttcagcatgttcttccttattcttggagtatatcaggatatcgtcgatgaacaccacgacaaactggtccaggtattccatgaagattttgttcattaagttcatgaagaatgctggagcattggtgagtccgaaggacatcactgtgaactcatatagaccataacgcgttgagaaagcggtcttcgggatatcttcagatctgattttcagttggtggtaacctgatctcaagtcaatttttgagaaaactcttgctcctttaagttgatcgaacaaatcgtcaatctgtggcaacgggtacttgttctttatagttacttcattcagggctctatagtcgattaccattctctcagagccatcctttttcttaaccagaagcactagggctccccaaggggatgagctaggtcgcacataactcttactctccaattcttcgatttgtcttttaacttctgctaactcattagctgccattcggtagggtctttttgcaattggtgcggtgcctggtgccagttctatggtgaactcaatctctcggtctggtggcatactcgttaattcttctggaaatacgtcgggatattcatagactatgggcaccgactccaaggaggtgacttgtaaacaggttaggatagaccgacttgcggtaggggtgttagaggtaaagcggacttgctttcctccaggtccttgcaaggtgatggacttttcggcacaatctatctgtcctttgtgcttagccaaccaatccatccctaggatgatgtccaagctttgcgagtctaggactatcggtttggctagaaagtcaacttcctcaattctaaggttaacttccgggcatatttgagtggcccttatattcctcccaggggaatgtactatcattggtacacgcaaattttgggttttccaaccatttcttttcacaaaagcttgtgatatgaaagaatggaaagctcctgaatcaaatagaactattgcgggtacggagttgacagagaacatacccatcacgacgtctggagcatcctgagcggtctcagcttgaatgtggttcacccggcctcgaccaaagttgttggaagcacgtgaaccttgtccacttgcctgagagctaggacgaggctgagctgccgctggagtaggagttctggcagtgctgccattagcatgccctgagttggtgttggtaggattctgagggcactgtctggcatagtgacccatctggttgcaccggaaacactgaactgctgacggtccctgcggtgacttgaaagaggtaacactgtttggcgcagtattgccactaggggcacgctgctgtggctgaggtgccggacggttcatctgaggacgaggggcgtagcctggctggcggttagcctgagtgaccgactggtgatattgcatgggttgaccgtagcgagggcgaggtgcgcctcgggaagaatttccctgatggttagacttgcgtttcttgtattcttcggtagcctcttttctggcatcttcaagtagaagtgccatgttgatcatatgttgaaaagtggggaagtcatgagcaagcaactggagtctcattccaacagcgatccctttcaagaatttcctgatcttcttcttgtctgtgtccacttcctcaggggcgtaccgagccaacttgttgaacatacttaggtactcattgacactgctgttgccttgcttaagtctgttgaattcctctttcttcatgtcaatagtgctttcaggcacatgagctacacggaaagccgtagcaaactcatcccaagcaatgttagtgggttcagggtgtgcattgcagtaattctcccaccaatctgcagcaggtcctcttagctggtgagaggcgtagagcgtcttctcaacaggagtacactgcactaagttgagttttctatcaacatctttcagccaatcgtcagcctcgacgggctcgacggtctgagagaactctggcggacgagacctcagaaaatctgtcagcttggatctattgttgctcatgtgagggtggccatttccatgcgcattatgctgaaaaccggctacggctgcggctaacccttgcaagatttgtgtctaaactgccattaagtgctgcatgttgttttccacatgaggtggggaagggaggcgttcttctccagaattgtgactagcagtgcggtgagagcggtgagactgttccatttctgcattacgggaagctgtgtgatgcgagcggttactgcgacggggttgctcaacttctgcgttgcgggaagcagtacggtgcgaacggttgctgtggtgagactgctcattagctgactcatgatttgcttctggctcaactctaccatcctcaaaaccaaagcgggctggtgcacgagcagcacggcgggggcggctaaccatctaaactcccagaagagggcggggtaagagtcagataagcacttaggagggcaaggagcaaagtaaatagcaactcagatagcacacactaggcataaactggatttttcatatcataaaaacacctagtacaacgggtgtagacaagtcacagagctacgccgagcttgactgtgcgcacaccacctaggagaaccagactaccaaacaatacccacaacaaacacacgcacgcactacctcgccacgactccaaaagagttggcggcggaacaaaagggcctaacacacggacggctgctgaagactgcctcctctactcctcgtctgcctggctgcttcctgtagtcggctcctcagtcgaagaaacgtcgatcggctgacgcgaagggaccggcggaacctgtcgagggccggcagcagcacgggccgctggcggtgggggagctgggtagtcgaaacggaacacggtggaagaaccaacaacacgcttccgcgcagtgcggataaagcgtgggcctcggcgggaggaagcaactggggtgtgtccgggggtgtaggaagggctaactgggtgtgggtagggagagtacactggtgagtatggcgcacgcgagctgggggagcgcgggccactgggagtgcgggcagagccgcgggagctgtgggaggacaggtggctggcgtggcagaggcggcctgagtcctaggagacagtgtcaactgaggtgacaccctcctcggccagacgggcctccaaagcagcgtagcggcgggcaagggagcggtaagcctcaaggagtaggtcgtgctgagtggcctgagcctccgaaagctcaaccatgcgagtcagcactggctgagactcgctgtaaggacaagggtacctggcgtctgcgtggccagaaggaaggcgtggaagctgccggaaggcagagcccccgagacggtggctgtagtcgtgggccaagcgacgaagcgcagtccaggagaggtcctggtacgcgatctggagagtgggcctggccacggtgaagtggtgtgggcgaaggccagctccgtgtatacctccacgagggtaaaggtacacagagagctcacaacgagggggaacacggtccacggagtaccccgtgtactccggacacgagaagccaacaaagcgggcgaggtcacgaagctgagcaacgtggtgaccctcaccaaaaccgtgggaactgaagctggcgttcactgccatctacaattttgaaagagggagaaagatcagtaaccattttagaaacaaactattgaaaataaggaaaccaaaagaagccttagcttttcgcaagtagttttgaacttagtatccttagggtcgtcctaaacgtcgggtttcgccctagggccaagcctgtgctctgataccatctcttgtcacgccccgaactagtaccgaccggaactagcccgcgacgctccaaattaacctgttagttgataccagtcccaagaaacagtgctggtatcacaggaagacagattatcacagcaacagaggtctctttattatagagtagaggtacagtcatgttgggctgcggacagatcccgagctcacaactgcattacaaaagggaagcggaagccaggacttggaccaaacaacacaggcgcgacttgggaactaggccgaaaccctaaaactcatcgtagccggcttgctcctggaagaactcctcatcagcaggatccacttcatcttcttcagcaactgggggggattatttatatagagcaagggtgagtacaggagtactcagcaagccatgggaaataagtgtttaatgcaggctacaaagaaagggctgctgtttttgcaattgattttatttgaactcttttctgaaaacaacttagtgagtgcttctcaaacgacacggatgagacagtgcgtctcgtccggtcggagtatgtgcaatgtatcagtctttagaattggccaagattggcacccggccaacatctttcaaacggccaaccgggccaacaactttcaaacggccacccgggcctagctgatcccatcagctgcagatttctcaaacatcgatcccctttttcacaacggcaatttcacaaggcagtagtcaaacaaaactatgctaggaatcacctcacatccgcccatgaccgtgggcacgactgttcgaacagtttgttaacctctgcagagggggtacactttacccacacgacattactaacccggatcacccagcccgtggggatcagccacgtctggagacctccaagctttcatgacaaggcatttcgaaagccgacacaggtttaccatatgccgacgagaggggtcccagaccaacaacaggttaggtcccagaccatactgtgccaggaagcccaggggtcctccccgacaccaccccggcgaatccacatgtctctcggcatcaaggctcccctgataagctagttactcagccaggggtgtcccattccacccatgtggtcgtacttgtcttatgttcggatgaaaatccaaggaaacggtccttaagtgcaagagcggaaaaccgtacacccggtacgttccccggtccgcggttttggaaattcatttagttcgcaagcaccgacccaggtgtcgggttttccaagtcttttgtaaaacccaagttttacccaagttgtttttcaaattttaagtttgaaggcgaccgtcgatactcgcacagagtgcacgaatatcgaggcgcaactagatggttacaagggaacatggtataacaattaacaaaggaaggatcaaatgcaacaaactaggtaggtctgccaatctgccttgcagacgggacaaacagattaagtgcgatcctatcaatgcataatatttttcaagcaacataattaagttcaaaggtggcttgccttgctcgagatcttgggcttgatcctcgaaatcctcgcactgcgggtcttcgggctccgaaactacactcgaaacgggacaactcaacaaacggcgaaaataaagccctattaatgacctctaagcgtgccattagatagatctcgagatttgaggaattttggaagttgaacggagtcaaacggatttacggttgggaagatattgaatttctaagattattggatttttggtctaaaggaaaaggatttaattaaatcctttttgaaaaagaaaagaagagggggagggaaattagacttttcctcgggcggctagggcgtggcccgagagaaaaggggcggctcagccgagctaaatgggccggccggcccaaggcggcccaagcacgcgcgcgcgggaggggaggagagagagagccggtggaccgggctcacctcgcgtggtcccgggtgggacccgcttgtcggtgacacggttcaccgtgcggagcgagcacgcggcgcacgcgcgcgggcgggggagggacgcggtgcacgcgcgcggttcgcggtggaacggatgcggcgggcccacgcgcagcctcacggcttgcggtggaacgcgcgcacggggaggggctgaccggggtcgacttgacccggccttggccgagctggcgccgacgtggcgcctacgtggctgccacgcgggccggcaggaggtagacgacgacgccggccggaacggacggcggacgacagcggcgagcggcggagcgaaccacgacgatacaggcgaaagcgagcacaccgggtggttgcacgagacgaggggagacgagccaacggctcggattcaccggagggagcttgacggcggcgaatcgcggcggcggcaaacggcggcgggagaaggggaaaacggcgacgaggtcacgaggggccgattcccggcggcgagagcacctatgcggctacgggaatccgatgctagcgttggattaggaggaaacgcatcgggggaggccggcgacgagaggcgcttccgagctcgggcggcgacggtggcgagcacatggcgagcggcgacaacggtcggggcggcgccggctagctacggggaggctactcgtgctactacccgagtctaaggggaggagatggagcgaggagggagaacggggagatgcactaccgtgcgggcgaggcgcagtgacgagaggccgacggcgcgggagtaatctctccggcctcgggccgaggaagaggaaggagagggcgtgcccggagtccccttccgcgtccttgctcgtgccggctcctccgacacgcgcaacgacgaacggcgacggcgaacagagcacgggaggcggcggcaatggcgtggaggcgaatgggagaggaaaggaaagggggaggcttgggtttataggatggcaatgtcggtttgggaaccaacttagggcggtcaaaggagagggctagcgctcggcggtcgcggccaaaacggcgatagggaggagggaggaggatgacgccggcgggaggaaaaaggggaaaagagggagaggaaagagggcttgtcccttgcctcttcgagaaaaggaggagggagcgggggcgacgcggcagagggaggaggagctctgcctccgtcctttggcagcttgcgcgcggagtggcggggccgaggcgatgacgacggcgatgacggcgggacggtgtggagcggagcggcgacacgggcgacaggcgcgggcaggcgcggcagaggctgacggcggcggcgaccaggcggtcggccaccacggcacgcgcgcgcgggaagcaacgggcggcgcggcggtttgagcggcgtggctcgggcacgcgcgctggcttgcggggccgagcggctgcgcggctgcagacgcggcagggcagcggggccgggtgacgcggacggcgcaggcgcggcacgggcggcaaccacgcgggcgcgcgcgcgaacaacggcgcgcgggggccgacttcgcgggcggggagctcgccagggatggaggcggggagagggagagcgagggggaggcgcccggcgcggcgcggctcacgcgcacgcgcgcgcggcgcgcgggcggagcggaggagggagggagagagagagagagagatagccggggagggagggggagatgggccgagagatattcggcccatcgaacccggggaggcaaaatagacttttgcggaggaattgatttgggaagggtttggattcgggattgaactcgacgatagatcggggatttgagatctgagatggcacggacactagacaacaagcaaagaaacaaatttcgcaattatggtttttaagagataattttcccgctaggcgccacgacggaacgggcgctacacataccctctacaatactatctatccaccatactcttagccacctactttctgtctaccagaacctacacataaaatatagagtctagccgatatgctacccaaaaatactaaaccctaggtatgatcctaccaaaacctaccatcagccgatacttgctatatatctgttcaactagttcaatcatccagtatacttcccatcctcctactaatcaaacccacacatgaaatataagcaagagtagttgcttaatcccctctagcctccaaccctctagaacctccgcataaaatatcaacacagtaatccatataccctataaaagagatagactataccctaaaccttagcccacataaccgtttatctctttcttactattttatggattttattgaaattggttcttcatctttcttagtagagtctattttattttggatggtaacctgtggtatttcgaggatcggataatcaggttgcctatctcggatttatttgcgttggagcaaggcaagttattattccttccctttgagcataaataccctacattctatattatattctatacactagccatacatgattttgaatgcataatctgaacatatagcgaaccagttatatgctagcttttgcttagccatgcttagttagaatatgcataaaatttaatgaacttagattgggacaatacgtaagatttggttgatttctgggtggctagtactgtcccggtcgatataattgccaccaaatacttatgtcaaacgaacgagtacgaccgtagcttctagaatggggacagacctagatattatgttaattaacaatgtggtacctctgtacagtggttccttttgtaagtcctcgcgcaggaggcaatcttatgccgagcagggcatcttatgatatttaccgaggcgcaggtaaatatattgattttcgctcatgatctgtgtgtgtgattttatggaaacctggttgagatgacgtggggtctctcatccagttctctctaaaaaccccgggaacgccagaactcctctcgctgctgataacgttacgttcagagcgcatggggactagagttcatggaacaggtgccactattgttaataacctaatattgtgccatgactaagctaatgaatattggcaagtcgtggactatgggtaaagcgtacatctactgcagtagaatattcatgaaactattcgaatagccgtgctcatggaattgagtaccgagactcatatggtatttggttagaaacttaattccagattttattaaatactgttgcatcaaacgcattgcaggatttctcctcctatattctctgctttctgcaagtaatcatagccctactcaaatactactaattcatacattcatattgaatataatagcttgctgagtacgttgtactcacccttgcttcaagccccacctttttcagagtccatttggagttcttatcgaagccgggagttcaatcacagaagttagttccctttaaacctagtcttgaagtctagtattgttagatggtttaattctatagcaaaacgacagagttgagtcatcatatagcttctgctgtattagttagccacaagtttgtaaatactcatatattttgtaataacatctcctctggagtcttgatcaaacgtatgcaatgaagatccagattgttgaacctgtatcaatctactgattcagggcttgatatagtctaaatatgtcggttaccgaatcattagttttgggacccgtcacacgtcgacagctattagtaccaactaatagtcgctgctccaatagtttaaccacgtgatacgcgcgcgatgaacttgcacattggaatacttcaaactagctaggattaacgcttcctctgtgtttggcgctggcgtggccaccagcgcgtgtcgacgcgtcagtgaggcgctagatggcgggtagttttcgtgagctctcctgcgtccgtgtactcacttggcgattttgcaaaaacgtccttgatttacctgataatttgttataggtccttagttctaacttttgcgtgcttacttacaggtcctctgtagaaaacaatattatatacgaagaagcgaaaaattggaaaatcgaaccgtgctctgaaaactagaagattaagagtgtttttgcaaaacaaaaacaaccctaacccccttcctcgaaccctagccgccaccattcatttgcctcctctccttctctcgctccgctctatctcctgcccaagcaatggccgccaccgcgtgccgcctccctcattctcttcttcccgcaagtgatgacctcccccgcgcactctctgctgccgtgcctgccgccgcccagcacgcgggccattgccgtcaccatcctctcgcttccgccgccgcatccgccaacgaggaggccgggaccgccggatccggtgacttcggcctcttcgctggcagatctggccactctaaggcgaggggaagccgacagccgccctctacgcccggtaccgcccctctctccctctcctctccatcctcttcatttccggatcggtggacgccggcgattaggcggcctagggttcatggtcaacaacagtggttgatccagtggctactttcccgatcgctcccctctctcctgtggcagcggcagtcacgattcgcgagattcctcatcccgcaccgtgcgctgatgatccctcttcgcctcctttcaccaatccgcggcaatggcacaatcgttgtcatcttcacgtgctcttcctccgttgcaatttgagacagagaggaattgcaatccctgacctggagcttttttggccatagatgtgaggatgaaagaaagagatgaagggggatgaacagagcaattgcaatcttctaccctcttgcttttcccatgcctcttgctgtttgtggctgcaatggtgagtactgaatctggtgttgacagtccttaaatcataatatctaaccgccaatatctgcatataatgaaataaaatatggtatctgtcgacgggggatatctgtagaccggataaatagggtattggagtacgttggtacaaggttctacacgatacgacatcataacgtataaaagataaggattatactggtttagccccctcgtgaagtaatagccctaatccagtttatatgggattgatatggaaaaccatagaatacaaagagaacagatggatccgacaataccggcgagatccttgtcgagatgattcaacgagatctcccgacggctttggctggcgtcctctggcttcatagactatggtgggtgtgctggcgctatgattcgatgatcatgaactcctcaaggggtatgccttttatactgtgaattgccttagtcttcaagtagaacccggagacaacaaaccctccacgatatagaattatccctatcttttccgagtaggattctgatagttactagcctgtaagggtattttccgtaatattttatatatttccttatcgcatacggaaacaaatcataagatatggggtataccaatccagtatacttggttaatcataggataggatgtatgtctcatccgtaaccctgacagtatccaacttagtggtagagattattactaatcaatttcactagtgttaatgaaatatgtgtatgtgggtattttaaggagaaaacacacccatcatgtgaggaaacacacctccgaccaattaggcgcgagtacacggatggaaggacccataagtcaggtgaaatcgtcatgaaatgagttataactgtcttaaccgtaatcaggacccactatatcaggagttcaggacccactatattatagaacttgctccaatgcaaagacctcgggctccacaggcacggaccatatgaaggggagaaaaacatgacaacccaactaacgatacggatggacgatcctcggttcctcaccacacatcctacctaacaaactcgagggaaagaaaaagtagtacagtactagtgcatatttattttagaacagactgaatcatcaacggaccagggaagcatggccttgaagcttctctggctgcatgccgacggacactgccagtgccacctctctctgctgctgcgcctcgtcgcttgcctcgcccttgtgctgctgctgccgccgccgccgcctgcccaagcggcgacggtggtcacccacctgccgggattcgatggtcctctacccttctacctggagaccgggtaagtgaactgaacaccctcacacaccaaagaatgctcattgctctgcttctttgcagaggcgtactctgagcctgaatctctgatcgattcaagagatcacatgaaactgcaggtacgtgggcgtggaggaggagaccgggacggagctcttctactacttcgtggagtcggagcggagccctcgcagcgacgtcgtgctgctgtggctgtcgggagggccgcggtgctcggtcttcagcggcttcgtgtacgaaataggttcgtagcccgtgcattcgcaactcggacatcatcgatgtattcgcaggttgcaattgggagaggcgactgggataatggggttcatgatgagcagtgccatgtttttttttttctcaggccctgtaatgtttgtcgcggaacgttacagcggcggcacggttccgcggttggagtataatccgtattcctggacgaaggtgagagcaaaatatttgtatatcagcactgatatagaagcgaattagtctataagtaggtctgtgtatatcaatacattttattttacccaattaagtctatagatgggttcatatattaacccacttacactcagtcatcaatttttctgctgaatatatatgtgggagagctacatatacataattatgtttatgagaaatttatttaactgtctttgatgctgctccatttggtttgtggttgattggacatttctagttggcaagcattctcttcgtggactcgcccgttggttccggtttttcatatgcgcacgatcccaaaggttatgatgttggagacatatcatcttctatgcaaattgtgaaatttctacgaaaggttgagacaaagcaagctagcgtctactataaacttccattaataaaaaatgttgagattttgtctctttatgcagtggctggatgatcatccaaagtacctttccaatccgttctatattggaggggattcatacgccggaaaggtggttcctcttatcacgcagtatctctctgaaggtaaatccatgtgttttctcttcgtgatgctagcaagcgacatattttaaaattagtatctccattctcaaatatatatgatgccagaatgcacatagacaaacatcaaaatcttaaatcattcataaatgcaaaaaggatttatacgtcttcaacttctgaccttccgtgagacagcgccgcagatccgtgtctcaccacatggccccctttgctaggagtacacatgagatgacatgggatgaagagtcgaagatgtagtggatcagggccatgctgtttacagggaaacctctcattggggtgggctagtcggtgttggggaataatcctattattaggttgttatcttaactaatgtaatttagatgactaaaatacccttgaggaaatgtcacttacatataacgaaccaagggcaataacgtaacttgtcgttgctctctcccccgttccatgcattttctcactaccatctatcctctcctcaactcctcttctacccggtattcaagcttgggctccttccaatggaggcgggagcccttgccctgcatattggattttatagtccaacagtcgggaacctacatgtacatagatagggatgcaatagagaccccctggatctttcacagctaacactaagtagggtttactattttggttcgtaaatttctatcggggggatcaggaatttcggaatggaatgattcaacatttgatcaaattccaaatttgaataaatttgctaagttcacaaaaataaataaattttaatgttttttgaactttttctatccggtggaaatagtttcatgccatggcccatgggttgccctagaaaccgtgttggaggccatgcagaggatgtccacatagactggtcggggagggtttacaagtttaggatggaggcggttaattaaggaggctaacggttagaatgagaagatgagagtgcctgtcaccgaagtaagtgtggataagtgactttctgaaggtgagtggctaggagcacgattgactagactatcagatgaaattagagaaaatacatatatcaatagagaatgagtaattttgaccatttacgtggtttaaaaaaaccatttgtagtgagttacgttgacaaattgatatgtaagttaaaagatagttgcagggcttacaatcacggcttaattattattttataagagcataaagatttatgttcttgagctcttaattatagttttgtatgtgattcattaatgacaattgtattgtgcttcaggaattgaagaaatgcgtcatccaatcattaatttaaaggttgtattttctagtgtgcagataatcacttagatgacaaaatagaaattatatatgtatctagcttgttaactcttgttgcttttattcagggttatctagtcggcaatcctagtgcaggagataagattgatgtgaactctagggttccatactctcattcatttggagtgatatctgaccaattgtatgaggtaatcttatatttttttactgaagtgtagcccactaaaatcctaacgatgtaatgtcagtgaagatacttattcttttccccttctatttatcaaaaggctgccctggcaaattgtaaaggggattatgaaaacccaacgaacaaaccatgcactgacgtaatgcagaccattaacaatgtaagctttgacatctatatatatctatatatatatatatatatatatatatatatatatatatatatatatatatattgcccttattgtctgaacttaccgtctagctagctttgtcatctatatatataccttctccacagctcatgtcagaagtattggaaccagcatgtccctttgactggccatggccaatgccaggaagagatgcttccaataggaagtctctaaccgaggagcactattggttaggtgacccacctgttgaacctcctttcagttgttttgctgtaagtcactatttattgtgttttggatttttaatttcttgcaaatgtaattcgaatgaggagaaagcacctacatttccattgagttttctttacaaacgattgccaaattttgcttttaggcataccgatactacctgtcttacttctgggcaaacgacaatgccaccagagctgctctcgggataaaggaggtaaacttccttatctcttggtcgtgagccttttactattctctctttgtcaaaaattactaactttgactagcaatttttaaaaatttatatagtttaacaacataatactatgtttccagattcaccatgagaaatgttttcagaatatatagttcatatgttgctaaactattattgattttttataaattgatagtcaaaattagaaatgtttaacttagaacaaaattaaagcgataaataatttaaaacggaggggctaattaatctacaagtcaataataaatcaccttccaaatagggaacggtgacggaatggataaggtgccctacgggtcttccttacacacgtgatcttccaagcagcatagaatgccatttcaacgtcaccaccaggggttaccgtgctcttgtgtacaggttcaattagcataatcaatattttcagcaggctcatttcttatttacatattgttttgaatcttcctgatcgcttacgcttaatgctctgtaaaaaaaaaaaaacttatgtgggtgcagcggagaccacgaccctattgtgccattctcaggcacgcaggcatggataagatcattaaacttttccattgttgatgattggagagcatggcaccttgatggccaggctgcagggttaagtgattttcctatcgtcttgcatccccatctggtcttatctctgaaaacaatcgattgcatcatcatttattagtcactttcatttttaatatgaacgaaattagacataaaattgacactatgtttaacaaaatatgaagatgaaaaaagagaatgggaaaaaaatagtacttcttacaattggtagcttagtttgctaaaatttcttcttgacctgattagaggtgaatgttgttttcttacaccagattcacaatcaagtatgctaacaacctgacctttgcgacaataaaggtttgtctcgttctctaccccttcgttgggtccattcaccatttttgttcatacattaaatggagaattagatgtcactggtattcatgcctaacacaagactatttggttgttttcctatggatgtagggtggttgccatattcctcccgaaaatcggcccaaggaatccttcattatggcaaaacggtggctggctggtggacccctctaatgtgccgtcgcgcacaatacggcatctctgaattcagattccgatcatcatcaacatatgtaatgtgctcattatattgagtaaatcaatataactagctggatggcccgtgcaattgcgcggctagcacccaaacaaaattatatattttttatatgattttacttaaaatttattagatagctatcttattatcttaagactttgaaagaccaacccttatcatctcgtgtttctaattatatagtttttaaaagtcacaccagttgctaccccttatgtcatctccttctttatttgcttgcttgatctaccactatttctttttattcttcttgaaacctttaaaaattggattttatagtttttagagtttagtgtcatgttgggtttcatttttataatttctagatgtcttgtcaaacgttgtcattatactcctctacggcccgtctaatgtctcttctctttattgtcattgagattttaaaaatcgaacataattattgtctgggttcaattttactttcaagaagtctcgccaaaatgtctatggctttgccattgtactcctctatagctcgcccgcagcattccttctttattgtcattgagattttaaaatcgaacatgattattagtgttttttttttactttttagaagtttcgaacctttaaaaattggacttgtagttccattttttatattttttagaagtcccatcaaacgatgccactatgcccctctatagcccgtccgccgtctattctttattgtcattatgattctaaaaatcgaacataaatatcgttggaattcattttttattttctagaagtcccgtcagccgtcggcggctctgcaagtatactcttatgcaccccgcccgctgcttctcctttttattgtcattgagatttaaaaatcgaatatgattatcaatggggtttgttttttttttctttctagacgtcccggcaaccgccttactcgtttgcttcacggcctgcttgacgtccctccttttaatcgtcattaggattctatttggtgttttattaacaatttttatatgtcgtatcaaccgccaccactctactcttttataggcatgttatttaatttatctcgttatgtgttttagatggttttttatttcaataatctttatttttatcaaaaaatttagttatttataaattgtattactaattgaaatcttttttttctttttctaatttcagatttttttaaaaaaaatagttattaccgtattgtgttcttttaatgtttttattttttattttcaatttcagttgtttcaaaattgtattcctacttgaactctcttttaaattttctaattttggatattattttattttttattctaaattttaattaatctcgtattgggtttttatatggattcttctttcaatattgcttatttttaatttcgaatttcagctaattttaaattgtatttctacttgaactcttcttttattttcttttgctaatttcggatttatttatttttattccaaatttttattaatctcatattgagctcttatatgcactcttcttttaatattccttattaatctcatattttttattaatctcatactgtgtctatatgaattattcttctaatatttcttatttttttattcctaatttcagttgttcgtaaaatgtatttttacttgaactcttatatttgatttttctagtttctaaatctattttattttttattacggatttcaattaatctttaattgtgttctacatgaactcttctttcattttttattgtgttattatttcaaaatcaaataaaaatccgtgcacatgccatcatgcttttctggttgctgacgtgtgcatcacccaaatacggctcactgtgcagccgcacggcttgacccgctgcttcggatttccgtcgctcgccgctagcatctatcttcatatcaacaaaaacgcatccaaattacggttctacagtggttcgttgcccgctgctttatttatatatgtgtattatagcctaattcatctctaactctagttaattggtttaggaaatcggacaaaactcttttgagtctgtttgcatgtaaaggccctagctagagattgattctaattctacacgcgtacggtactccgtatctcttaattaacatgccaagtttgtcttaaatcttactttatatgtaaatttgcttggatcttgcgaggcacgggctgcagcaagcatacaaagaattgtactttaatcatacaaagaagaaacaactcccacggttagtttagcataggatgagctagatgttaatagataagaaagaaagttttatgaaccaaagtgccacgtagtaaaattaacaagtcaaaagtgaaaagtcaggataaagggtggtccaaaactgataaaaggtcacatgttgcactagggaaaaattaggcctaaactgtaatttactcaataatcattaatcgaggtggcacaataacgatgtcacgtgtttattcttcgctagattagagattgagttataggtaaaacaaaatgcatcttaaatcaaaatcacaataacgatatcacgtgtttattcttcgctagatatattagagaatgagttctaggtaaaacaaaatgcatcttaaatcaaattcactattagtcggtcaaatgttaacaccataatcacatttgtcccttgcagaaaggatgattttttttgttagtgctatccacctattaaaaagctccattaggagttagctagacaataatttgcaacttatcgtgttgacaacttgacatgcatacctttcatgtactggcctctttagcacaagatacaacaacctaaccgaaccagcatctagcgactagcgtcggggaaagaaggatcagatcagttgtttcagcttaatttagacgctaagaagagaaacctaacacatttgatggcggttagttgcatgcaggcacatggcttcattcatgggtcataaatgtaatcaagcattcaagcctatatatagttgtgtggcaagaatatatgggctgccgcggttgaaggaatagaaggccgaagagttggatctgcaatctgcaggccgcatgaaagtgggaagggaaaaagtacaccaaaggttcctcaactttgtcatcgagttacaaaatcatcctctaaccgcaaaatcggatatccggcgtcccttaactaatcaaaaccagtcacaatagctccttcgatggttttgaccccggttttattctacgtggcggctgagtcagcgtggacccacgtggtcatctctttttttcccttttcttctcttttctcttttattttcttcacttctcttgtcttcttcagcgcgtaagcgacggggccaagacgggcgcgcgggcgaagcaggcagagatgcgcggccgaagcggagcaaggggcgggcgccgctggagttgggcggcgacggggcgccagcagcagccgccgccacgctcacctgccgccaccgcgctcgcccgccaccaccgcgctcgcccgccgcccctgcctgcttcgcccgccgcacgctcgctcgacagggcggcgatggctttatggagacgtgacggcagcaggacggaatgtgagggaggccccgagcgagacggtgttcacggactccgtcgacgggagcagctccagctctgacgccgcatccaccgacgagtggccggtgacgatgtcgccgcccaggcgcccatgaagacggtaggcagcgccgctgcgggttcatcagccactgcgtccttctgcaactggcgtccctagaaacgacgctggcgaggctcgaccgacaatcgatccaagcgagaatatcttgagctgaaggaatggccacccgaaccgtccacgtgggaatggctccggaacggtggggacgtagagcgtgagctcctcggtgaggttggacaggctagtcatctcgttgacggcgtcgccggatttcctcgggtagctcagcagcgaattggcaatgacagtgccgtagttgaaccgcttcgctggaggaactcgccgaccagctagaccttggtgtagcggacgccaagctcagctgctcaccgccggagacgccgaaccagctccacaactcgatggggtgcaccgtccattggaatgtcagcggcggaaagcggcgctgccgccatcgccgtggggtgatctggcccatcatgatgctgccgtggtgccggagaaggtggtatgtgttaaataaatgaacttatgtcagttgggatttgatcttgccttgatcttatactcttatttactttctgttagtttgttagctattttccctcctcccatggttttctgctcgctctgttttgagtcagcgtgaccgcgatttgttcggtcaagtagtggagcttgacgagcgggagagtatcgagctgagaaaatgaacagcaccatgaactagcgtcggtgagcaccacctcccttctgctcgagctcggttgagggctgggagcttgaccttcgtgcccaccgcccaccgccggccgccgtcgcgccgccgtcctcctcctctcccgcctcgccctgtcgatgcccgcgtcgttcgcgccttccagccgcccgcgacgcctgcacacgcctgcgcctccctgtcgacgcccgcgcaaggtcgctgcacgcccgcgtcgtggagctccgccgggctgccgtcgggcatccccactgtggccgccgccggcggccgccatcgcggcgccgcgctcctccttttccccctcgctccgccaaccgacctacaggtgcagagagagaggaggaaccgaggaagagaagaaggggaagatagatgactcagcctgacatggctgaatcagccgccacgtaggataaaaccggtgtcaaaaccaccaaaggacctattgtggccggtttttattagttaagggacgctagatatctggttttatggttggaggacgattttgtaactccatgacaagttgggggaccttcggtgtactttttccaagtgggaagtggctctgggcttttggatttgtctatgtatgcagccattgggctctactatgcttatacgagtgcgatgaggcctgatgtgcttactctaagaataagttcactttgactaccttaactagtcactgtgtcgaccccaactattaaaatcgatgttatttgactccctcgatgattttgaaaggccgtttcgctatcgtggcaactacgtggtggtgtagacattgtctttgtcctacgtggcgttgacgtggtgcttatgtggtattagaatgaaaaaaatatatgggacccatttatcgctcacaacaaggaatattgcgggagccgggagacactaacatgtgagacccacacatcatcctccctttctccttaccttcttcctctctctctctctctctcatcgtctcctctatgaggttgttgcttggataggcggcagcagcatcggcatcgccatagaggtggtgtctcttcggcgctggctcgtgcccacctgccgccaccgcacaagaacgcacggttcccggaccccgtcgctggtagagtcgaccacagaagggggaacaccaccatggcgcacagacggtgcagtgcaggaggcagcaaccaggaagggagtaagagcatgccacttgtcgtcgtcgccacgggcgtcgcgctgtccgacgcggtgttggtgctccttcgttgtcctcatggtgttcctggcgtgcgggaggttccagaggagggccatgccgggtgcttaccaaagcggcacaacacaaggttagcttcgatcctggcccggacctgttctacctggacgtcgttaagccgtacgtcgaggccgaccatggcgacgacgagcggtgttgtaaagacgttgccagagttggtcgggctgaggaaagagcccaggtgggaggataagacaacggagttgctatgtccgacaatggcaccaagccgtcgactttgttccattcctcgtgctacttccactcgtcgcacttctcataccccgagctccgggacatgaaggcagcggggagcaatggcatgtcaccatcgccatccggtcggtcaagatgtcggagcttcgccgctgctccagctctccctgcaaaaggcgaaaggggagagaaatagaaagagagagaagggagagagagagggaggaggaagaagggaaggagaaagagaggatgacgtgtgggtcccacaatatttcttttgtgaatgacaaatgggtctcacatattttttttaattctaatactccattcgttcaaaaatataacaatttttagcattcaaagtttgtccaaaagtatataactttttcacctacattcattctcaaccaatcataacctttcaccattcaaattcttcacatactttctcttctcaactaatcacaaccctcttccatttaatcaaacctacttttttaatgctcgtgcccaagcctaaaacttcttatattttaggacggaggtagtatcacataagcgtcacgtcaacgtcacgtaagatgaagaccaagtcaatgccgctacgtagtcaccacgtcaaggaaaccaccctccaaccgccgacagagtcaaattgcaccggttttaatagttaggacttaggagggtcaacatatctgatattgtggtttaaggatacgaatcagattatgccactaggtaagggaatcaaagtgaacttatttccttactctactatgcatgtgggccgtcaggtagccacggttcaagcgagaatgttgttcggcgatcgatcgccctggggatggggcagcgatcgatcccctcccccctccctccctccacccctccacctggtttccttttttggcaccgcattacttttctattttagtaaatttatacacctaaagtttatacacctcaagtttacacatataaagtttagagaccaaaagtttataagtcaaaagtttatatatccgattcaaatttgaatttgaattcaaatatttttttatatatagtatttctatacatctaaagtttatacacctaaagtttatagacctaaagtttataagtcaaaagtttatatacccgttcaaatttgaatttgaattatatctgattcaaatttaaatttgaattcaaatattttctatatatagtatttctatacatctaaagtttatacacctaaagtttatagatccaaaatttataagtcaaaagtttacatacccgattcaaatttgaatttgaattatatccgattcaaatttgaatttgaattcaaatattttctatatatagtatttctatacatctaaagtttatacacctaaagtttatagacccaaagtttataagttaaaagtttacatacccgattcaaatttgaatttgaattcaaatttttttatatagtatttctatatataaatttttctaacttttgtttttttaaaaaaattgtgtggtgcactgcagtggaaagagaagaaggggaggaggaagggaacaagagggaggagtatagggggaggggggaaaccgatcactgggcaatcgccctggcgatcgatcgcccattagcctcccccggttcaagtggcctccatgagtttttttttatgaaatctgcttcacaaggaaattagtaaaatactatactcctgcgttaaatatgattcaaatctataatttcatgtttgctgtaaatgagtactaagtctgattttccaataatgctatatgggttttctccccctgaacttataaatgtcactcttgcacgatgcgtggggagcaggcaggagagcacgtaggcacgtactagagcgaagggtcgcacgaggggatgttctgtttcacgtgcggacgtttgcacgcggcacaaacacatttgtgattattcacaatgtacacccatttaaaggaggtggcaatttattgaggaaagaattggaatatagccggaagtacattaaagagtcgattttcatgatcaatcgcattgaatttagaatttattacattgatcagtttccttttgaaggtcctttctcttctataaatctcagtgtacctggaggagccaaaccacaaaaaagcatcattagcttctccccggcctgagaattcccgatgcatcccatcatcgctacactcctcctcgccgccgcaatagcccccggtctcacggtgggttccccatctctcatcaacgagacatgcaccgcaacttccaactatggctactgcttgggcgtgctctcggctgatccggcaggcgcctccgccacggacaagcgtggcctcgccatcgccgcggccaacatcacgatgcgcaacgtgacgtccacggtacgcgtcctcaccgagctggtagaggagctcaagctctgcatcaagtactaccaggacatggacgatctcgtggccagcgccatcgacgacctgcgtgtcgggcgccccgccgttacctcgttctacaaactgcaccgggcctcggacgagcccggcaactgtgatataatgttgtttgagggaagcgcccacaagaacccggtgagctcggagaacatgtacaacgaggccatttcaaagttaaccagcgacatcgtgtaccagttggtacattaatacaattagcctaagttgcatggataggtccacctccccctcctcctccttaatcttactctacccatgtattgtattgggaggctgtgggtagcatcatgccatttccaggcatcagctaatacagtttgctggcaaggctgcgtctgattgtttctatgaattctgttgctattgttgtgcttaacaaaatgttaaatgcccatagtccatatttgggggtgggtgggttctgatgcgcgactgttcggagccccaaaaagatactgctgagaatttgagagacctcggccactccagcttttgcgaatctccgctacagtcgcctcgttcattctccgacccctcttcctcctctccggtggatcaccaccaacgatggatgaaaggggggtcggatgtctcttctcatctagtagtgtaagtagtagtcttgctttctcgtttggtcaggtcatcgtgttagttcgagttcttctcgttatcatccatcttttactgctcaaggtgtccgtcggcttcgacgctcctcgtcttggtggtgtggtgagcatcaccggttttttagccagtgattggtcacctctttgccgggtttcttctcccagccgttggatgagatacttttagatctgggaaaaaaaggttgcgccaacctttctcgatttctccgacgagttctatacaaaggaggtggtcttcttcttgacctccagtgaagatcaattacacggctgaaggtttcaagttttgctgagatggtctcaacctcccatgcgtggaggccctaatcggggatgcccctcagtttcttttgcagttagtggtgttactcttgctatccttgccggtggtatggatggggctggcttctttggattatctgctttggcgtcgacccctatcaaaacttctggtgggtttcttattcggcgtagctttttagataatggaatataatatctcggcctttgctcaaaaagagctacagccaattattacaaaattccactccagaagagagtgtagttcaagacaagttgaacacaccaaacaggaaaagagaggacacaaactaagaaaagcaaaacaaaaagtggagctagaaggcctcgtcaaagcctaggactgaagttcgaagccaatgcatagaccattgacaatccttgcacgaagaggtttctccaaagcggtgcccccaaggaggacgcgacgtggatcgccgccaccgctcgttcggaaggaagcaaggttttcacccggagaatatggttagaaaaggagaggggtaatctaaaatgacgcctccaaggaggggaacgatgccaaacggcgtcgccgtcgtcagccggccaaacggctcggcaaggctttcgcccgcgattccctgtccaaacccacaccactaatccgcacaagaaggatcttcatcgatcaacaacattgtccctttagaaattcggccaaggccaccgcccacagttcttgacagcgcgcccgcacccggactcctccttccccgtctccacatgccgctgccgacgatgacgcaccgtcagcctcggatgatggccttgcaccaccgtcgacagccgccactgccagcgccacagccaccaccgtcgccagccgccatcgccagccaccatcgccaccgccaccaccaccgccaccgccacccccgtccagccgccaccatcagccaccaccgtccagtcgccaccgtcagcctccaccatcgccagccgccaaccgtccagaccggcctgggtggcgcggacctgaaggtgcagcgcacagtgcgggtcgccggcgccatggaggaaggcgtcacgggcacggcgtacaattgacgggcgccgcgcctccctcatggcggcaaggttcttgacgagggccggcgtcgcggcacgcgccgtagtccgccgccttcgtcgccaacttcgtcgccgctacatccgccaccatcgccgccgccagccacccccctgccaggtccgtggagcggcgccggcatcgaccgagcccgtcgccggtcgcctcggccaagcggggcgaccggatctggcgcctgcccgtcgccggagccgcggacctctaccccaccaccttcgcatgggcgtctcccgcggcgctgccgcggccgccgcctccgtgcactctgccgcctccgcgtggcccacgcgccacaccgccgccgacccgcgcgtcccaacccagatctggccaaggggccggatccaaaccgaacggcgccggatttggctgtcgttgccaggaccacgctctcgctctttggtgtcgtcggcgccccaaccggctgaccgggagtgagggagaagggagccccgccgccgccatcttcgcagtcgcccggctttgccggcggctgctcaggcggcggcaaggtgggggagaggaggagagtgaggaggcgacggcgaggtttcgccgcccgcgtcgcccttcggcgtagctgaagttgttatttgtttgccatctcctcaacctccatctatcatctatgagaggccccgttaaggattgtgcggtggcgtcatcttgtggagctcacttggagctcacttggatccaacctccgccgatgttaggattcaaagtttcgtcgtcgacgttgaagacagaggcagttcgagcaggactcaattgttttttttttcttttcttcttaagtcctttactacaaaatgttgagctaaagtgtaatctgcccattgttaaggggctcctttgcaaaactggatgggacggaaggagtatattgttcttctgaacttctttaaataaataaatacattgtttttcaaagagaaagaaagaaagatgcacgactgttcagcagctgtggacgagacaaggaaatccaaagctgggctgccccttgaaattctggcccacgtgtaaatgaggaagggaccgaacggaaaaccaattctctcctcaaggcccggaaggcccaacctgcaccgtcaatttttgaagaagtgctagcaaagggcgcgcgctcgggaggaagaagtgcaccatggattgatccgtggtctttcagattggaatcggactcccattgccgtctactactaacaaacactttgttctgaaaacacggcaggagagatgaggttatgggtggtatggatcacaccaacgtgatgacaaagagtgtacgttgtagtgaaccaagacaacacgtgccatgggcgcgcacgagcccttgtgatgcgattatggattatgtgggattgccactcgcccactcgccttctcctgttatgcttcttcgtgctgatttagtaagacgagatgcaggacggctgatggacatgatcaagcaagttccacgtataggttatattttagtatacgccaccggcttctcctacttcttcagttaatttagtaagatttgacgccacaggctgaagatatgcatcatcaagtaattgggaagaagatgcagacctgaacatgctatatatatatatggtcatgggcggtgaacaatttttattttcgagggaattggccggtgaacaacctaatgtgatcttacttcttaagtatatgcaatactatcttactttcacggcttgatttctcatatcgggctacgggatcgaacaaaaatgaagcaatggctgtttagcatgcctgcaagttaacgttgttttttttttcatccaatatttcacttataaaaacctcccacgcataacaccaacaacaccatctgttctctgttgacacgtaaaattgattcacgcaacaacaatgaaaaccgttgtgctttcgtgacgacgaacgactagttttcaagcaaactagcaaagatcttcactttcgtggaagaacccgactgattttcagcgcaaaccagtaaagatcatctgcaccctagataactaggatttggccaaagaaacaagagtaaaagtacgatgaaaacagtagaagaaaataatataggatgataattgttccagagccctaccaagtgcaaaatccatagtatatagtaaaggaatacactgtactgcatatatagaaaactctaggtaaatccgtgattaattctatctaatcaaaaccgtcatttttaaacgacagcttccatgcagacgtatacacgcctcagccgaaagtcgcctctatcctgcaacgctgctccagcccaagtttcagaatttgtctccccttactctggcaacaatgtgatcctgtgtggctagacttcaacaggcatatcatcaaacatagccatgcatccaaccccagccacataaaatcaaccactgaagcctcacatccattgaatcggcaaaagctccatcgctgcatgctagctgcttgaactgacaaaatctgagaattgcagcctcccaagtcctaaccttcttctctagtttctgcagctccccagcaactcgtacacctcccgatgcatcacaaattcctgcccttgtcaagctaaccaattcttaagcaaaccactaaaacaattacaccaactattctatataatttggcctgtctaaaatgacctaaccaaaagccaaattatgctactaacattctccaagaaaaaagacaccaagaccataccacatgttctctatggcgtgtaacacactttctgtctctacttcatgttagtgatatgccctagaggcaatcatagagatgattgtatcacatattatgtttacatatttatccgacattgttccttgaaatagataactccttattggttaatgaatatgtgattctttcatgagactttttatgttgtttgttactatttctaaaggatccctgatcaaatatcatatgtggaacaaatatgtttatatgatcagcacatgtattaattgatgattatgtctcatggatcatggtatagagataccaaattaataatgtggacatatgttggtgaacatgttgttaggtagacccaacatgagacactgcaagagccatatgtgttgtgtcatcagtgatctcattgagtgttgatgttgaatccttagacctgagattatcatggttctcaacatgtgtagtagcttacttagggactgctaaacgctactccgtaattgggtagttataaaagtagttttcgagtatgctatgaaacatgtatagtgggatatgaataatcaagatgggatttgcccctcctatggagagatatctctggacccctcgatgttgcagattatggaagtgcatggccataccaaaggtgattgaggagtcaatcacaagttatataatctatcaacaggttcgagtgaatgattgagctattagaggatggcacatatctagccttgagcttaatcgatatcgtgaggcaaaggggttcatacaactatacactagaggttcagccgatatgatctttatgtatgcccggtgggtatacactagaggttcagccgatatgatctttatgtatgcccggtgggttaataagttctgctggagtgtgttgcatagtagttatagttgctatactctgcttacctgttttcactgattcttcggttaggaataacccatgtgctaatttccagcctcctagtgatgcagctgctttatctatttattgcgttgattccaatggatgctgcaacttcagctgtgtgcaatcagccgtcgatgcgattcccgaaaatagattgacaagaagtgtcgtttgaatcaactccggcacatacatgtaagtgttttgcattaatttattggactgctaattctgctggatacattcatgcattgtttaagggatgtacactttcttttgcacagtgaaaaggtgacagtgaacttttcaaagcctaatgtaacattccaaggacaaggttttgagtcgacgatcatcgtttggaacaatagcgcaaaaaatacaggcacattttacagcgccaccgttgatgtttttgctacaggatttgtaacgaacaacatcagttttaaggtatgttcttgtgctcacaaaacttaatttgcttaattatgtatacggcagaagggtttagtttatctactgattcattctgtgtagaatgcatccccagctccaaagccgggtgatcgtgacggacaggctgtagcaattagagtttcaggtgatcaagcagcgttttgggttgcggcatgtatagctaccaagatacattatttgatgatttaggccgtcattactttagtgattgttttattgaaggttcgattgattttatctttggcaacggcagatcattttatgaggtacgtaccacacaaatcttcgatggttctagttacgttttattttcattgagtgagtaacaaacttgccatgcatctaaccaagtttctgtgcgtttttcagaagtgtattttgaactcggtagctacaagcgatgggatcaacggtgcaatatgtgcacaaggccgtgaatacgcggccgatgacacgggctttgcctttgtcaattgtcgcatcaccggcagtgggctgattttattgggccgtgcatggaggccctactcccgcgtggtcttcgcgcacacggacatgcccggtatcattgtgccgagggttggagcgactgggacgacccgcaacgagatgcgtacgtattctttctactactacttccgtttcattttatattagctgtatgtttctaaacatgtatactacggttttatttgttttaacagcacgatgttctacggtgaatacatgtgtacgggtgtgggcgccaacatgaccggtagagtaccatatgccaaaccgctgacggagcagcaggcgcagatatacctggacgcttcctacgtggacgcggatggctggttaaaaccgttcaacgattctcttatagttaattgagtacaataccatgtaaataatggcgggggtgcaattctttgtacttaacacggttgtttagtactactaagggaccacctatatattcgtcgataaattttctccaaaaaatttgacagatgtaattatagtacaatcgtaatgtaattacactgtaacttatatgtaattacactgtaacttgcatgtaactacagtgtaacttgtaaataagtttcatttaattttgaatctttaaatctattacaagatttgttttggtaaggaagaaaaataaaatcacagcacacatatatgtgtaaggatttgtttccacaatctctattttaccgaaataacatattacagagacatttttgaaagttacatacaagttacactatagttacagtgtaattacatgcaagttacagtgtaattatattacgattgtactgtaattacatctgtcaaatttttaggagaaaatttgtcgacaaatatatagcaaaatcgtactactaatatgtatatatctggtatccggagtactccctctgtttcaaaatgtttgacaccgttgactttttagcacatgtttgaccgttcatcttattaaaaaaaatttgtgaaatatataaaactatatgtgtacatgaaagtatatttaacaatgaatcaaatgatatgaaaagaataaataattacttaaattttttaaataagatgaatggttaaacacgtacttaaaaaattaacggtgtcaaacattttgaaacggagggagtacttatttactcacaatttggcgataaatgaaaatgagtaaccagtaacgatcctgtgtactaccacaaagggggtgtttagatggggctaaaactttttagaccatgtcacatcggatgtttggacgctaatttagagtattaaacatggactaataaaaaaactaatttcataaataagagatgatccacgagacgaattttttaagcctaattaatctataattatcaaaagtttactgtagcatcatattatcaaaatcatggcgtaattagacttaaaagattcgtctcgcgagttagtccaagctcatgaaatgaattttgtaattagtgtatatttaatactctaaattaatgttcaaatatccgatatgacagggatttaaaataagtctccggaaaccaaacagccctaaagttacgaattttctgaagtctcatcaccgcaaccacccgaaacgcaacccctctctggagatcaccagatctactcgtccccaatggcggccgccgccgccacctccccggcgcgggcggcggcctggaccttcgccgccgccacatgcgtcaagctcctgctcgtccccacctaccgctccaccgacttcgacgtgcaccgctactggctcgccctcacccacgccctccccgcgcggcggtggtacaccgacgcctcgtcgcagtggacgctcgactacccgcccttcttcgcctacttctcccgcctcctcgccctcccggcgcccctcgtcgacgcctccctcgtctccctccccgtccccgacgcgccgccctccttcgcctacctcctctacctccgcctcaccgtcgccttctccgacctcctcctcctcctctcctccgtcctcctgctggccacggacgcgctcacgcggcggcggcggcggccgttcctctccctcgcgctcgtcctctggtcgccggcgctgctcgccgtggaccacgtacacttccagtacaacgggttcctgatggggctgctgctgctgtcgctgcacttccttgagcaggggagggatctcgccggcggagtcgtttttgctgctctgctgtgctcgaagcacctgttcctagtggcggcgccggtctacttcgtgtatcttttccggcattattgctgtggccggggtgtggtgaggggattgggaaggttggtgctgatgggggctggtgtggctgctgtgtttgctgctgcatttgtgcccttcctgtactatgggcaggtgagttttgctcggttaatttacctttggaatggacgaattggtatgttttttttttgtttagatactgtaatccatctgtaatcatcagttcacttaaaagtaggaaattatttcttgagaggatttcaggatttttcctgtagttcatcaagtgttcagaattagaagatcggtgaagtttataattaagtagttccctatcagtttgtgcacgtaggttgcataattggcacaatattgtcttactcattgcaacaaataatcttgcagatgcaacagctctttaaccggttgtttccctttggtcgaggcctgtgccatgcttattgggcgccaaatttttgggtattctacattttacttgacaagatcttcgcgtttcttcttagaagactaggcttcaacatccagatacctgaagcttcatttaccggggggcttgttggtaattcgtctccttttgctgttcttcccaaggttctctctaccactatgaattcttatatatttccaagggagaatggctatctcaatggtttaataatttgttttaatgaacttacggattgcaggtcactccaataactacatttttattggtcatacttgctatgtctccttgcctcatgaaagcattctctaaaccccagccaaggcacattattagatgggtgtcatatgcaactacatgtgggtttatgtttggatggcatgtacatgagaaggcatcactccatttcactattccgcttgccctaattgccatggatagcttggaggacgcgaagcattattttgtgttgtcaataggtatgtttgagactttgagtcagttgagtcaccgttaactcttgcttaaactcctacttgcttttactgtaatacctactgtttcacaattttcttagaaaaacatctctttctgattgatacactcctttcaccataatacatactccctctgtttcaggctgtaagatgttttggttttgtcgtaagtcaaacttcttcaagtttgaccaagttttttttataaaaaaaagcgtagcaacatttttaaacaccaaacaaatatattattaaaaatatattcaatggaggatttaatgaaattaatttagtgttctaaatattattacatttttctataaacttggaaaagtttgacttaggacaaaaccaaatatcttacattctgaaatggagggagtactatattcacaaaaaaagagttagaaagcattggggtactggttaccatgtgaataactcatatcaggtgatggttcaagacctaagccaatagaaaatacctaattaaactattcggaacagacaccatcttttgcacactgaccaagaaaatggggaaaaagggaaaagccaaccatgtgatacaacattgttttgtactccctccgtcccaacatgtaagcatttttagctatgaatctagacaattgtgtgtccagattcatagccaaaaattactatattttgggacggaggtagtatttatagtggtatagtccactgctgcaaaccatagtacttctagctttaataatgaaaatggcgtgcagtttttcttatttttataactgaaattgtattttgatgaaccagtggcgttcatctgttctgcactttcacttacgtaaaatctgttcactatggagacacatagtcacatactgcttaacatgtataatgagctattgctgtaatatcctgccatttcttagtttgctaacttgttggacagttggagttgaacaccatttcataactatattttaataactcattgtgtcattctatggtagcaactggagcaaaatttcgtgtaattttgcctcaagacaacctgaactaccagtttaacaatgacttatgaagtgctgattatatattgtttgttttgctttgacatacatttttttgttttgcagtttcatgttattcattgttcccattgttgtttgagaaccaagaatatcctataaaggttatgcttctgttgacctatgctaccctcatgtgggtaggattttcttcccattttgctgcaaaatctcctcaagaagggaagaaagtaaatgaatcaggcagcgtggtcaggaaaaatagcttcattgggtggatcagttttagctatcttttaggaattgttgctatagaattatggtctcaagtattccaccactatgtatttggcagcagatttcctttcctacctctcataatggtgtcactctactgtggtgtcggaatgatgtactcatggatgtggcaactcgcatggattgtcaggcactaatatggtctctggttagcaacacgagcatgctgctttgccttgctgggaacccagcctcgcactaatttgtgataactcacccctcttgaccattgcattaggccatctttcccaccccaagttgctactggggtgggaacatgttgacacattcagttgtacagcgtgatggcaattttcggagatgtaaacctcttgtgataactcacccctcttgaccattgcattatgccatcgttctctccccaaattactactgggaacatcattcatatgttgacacattcagttctacagtgtgttggcaatttttggagtaaccttttcgtgatgtaatgtattcttttgtatggagctgcttgtaccaatccattcttcatgggttggtctttttcttcttctgataattctggaacgtgctctgctgattgtacgatgaccatggagatgcttactgtctttcttttccatttttctggaatgcaataaggtatccattggcctccctgattttactactggtgttgcatcatacttgaacatcacttgttgaaaacacattccaatcacgatgtatcaccgaaatttgttgcttgctgtttgatggaccctgtggtcggagttatctaccataccacaagtgcattcggtgtgataaaagaagttattcttttgttctcttaagaggctacagcccgagttgcagagtcccgttgcaattgaaccggacacgtaagcaactggattaaaagagagagagagagagagagcactggattagatgcaaaataaaaaccgagaaagtttaaaacagtagatgcaaataaaaaccaaaaagtagaaagtttaaaacagtagatgcaaagtaaaaaccgagaaagcttaaaatagtagatgcaagattaaaacagtagatgcaagataaaaaccaaaaagcagaaagtttaaaattgtagatgcaaaataaaaaccaaatagatgcaaaaataaaaaccgaaaaagtctaaataaaaacggaagcaaaaccaaaaaggataaagtttaaaacagtagatgcaaaataaaaaccaaatagatgcaaaaataaaaaccgaaaaagtttaaacaaaaacggaagcaaaaccaaaaaggataaagtttaaaacagtagatgcaaaacaaaaaccgagaaagattaaaacagtagatgcaagataaaaaccaaaaagcagaaagaaaaccgagaaagtttaaagaaaaacagctcaactaaattatcagagccaggtttcgatcctgggacctgtgggttatgggcccaccacgcttccgctgcgccactctgatgttgttggtatgattctttcacaaacttattagatgtcgaaaatattaatgggccttgaccaggacggcccaaaaactaagaaactactcatacagccacgcaggtagaataacaacgacaaataattctcagtattcagtaagacttaacacgatacactctgacagtctacaagttaatctcttggttgcagcatcaaacagcattctcgtacaagcctcgatcaagcttggtgtccacggcacaaaagaaaaaacgagaaggaaaaggcaaagcgaaacgaaacgtcggctccttttggccccaaaccttgcgtaacgtcgatcacctgtgtcacttgctgctaatattttttactttccagttgtcagaactcagaagaaaaaaaacttataaagaactcaaatttcctctttctgctttcgatcggattacgatatactatgcatgttcttggtgaacagcaagttgcagacaagtttgactccttttttgcctttagttagcgatggttttcacaaaatttagtccctctcacaaaattataagtccctccaacttataattttgtgagagggactaaagtttagctcaactttagtccctccaaccaaacaccacctaacttgcatggaccagccacatgtaacaacgcaaggtatagtcaaccatggtcccttaattttccatgtcgatccaaacgtatgaaagctcttgtatgagctagctgtgatgtcatggaatggaagggaggtaggtcacatgagacatcacccggatttgtatctacccttctacggaacctgtactagctcaattcagatggagatttctgattacgactgtatttattttcaatttgagaaaggtaatatcacgtgtgattatgtgtttgctaatgagtgtaattttggttatgtacttatgtgtcaggttattgcctaagccgcgttggccgggtgcacctcagcaaattaatcaccatccatgaagctgttaccatgtcagcttaggataaaattctgtgcttatgggtcaagaatcggataatctaatggaaagacttctgggtttacactgaacctaacccggatttgattatcggaatgccatgtaaacacgttctgacgttcctgtctgtcaacgtttcaggttgattgagttagaataaccacgacgaagcagggtggatcattctgcagaatgaaagactactactattggattcggtttcagacacttttatagtcttcttccctcattggataggagaaaggagaaaggcgataaccagagcagtgatctttttgttcgagtatcatatggatcgttgattcttcttgtcaattctcatcatgacatcatagtcttgatgagatagaggaatcaaaaggcgacagagcaaagaaggcggcaaggcagcttgctcctcacgctcatcatggcaatatggcatcagggatgagcaaatgagaagagggacaaggcgatctcatgagtcatgactaggcatggtaggtgcagccgaacaagaagagctcatcagtttcagcaccaaatcactgcctgcttgcctgaatctgaatgcctgcacaagaactgcagccttaagattgggcatgcaccaggaatccacatggcatatgttgcaacttgcatgcagggattgtgctttacttgcattggctccatatcaaagtggtaaacagttccatcttcttgcagttttgctatccaagtgtaaagggtagaactgaactgttgaatgacagtggttcagccaggtcccgtgtaaatattggaaaagaacacttttgcagtggggtaatcaggtgatgctacttgctaacaccttccctagtcccacctcagatggttgcacataagaaatcacacaagagaacaaactttaaactgaagtacttggtccagaactaacaaaaaatttaccccctgaataacaggcagccaactgataatcaaatcaaatgacacttcaggagtttctggattaggctagaaaatacaatatagtatagctagtaatcaagtgacatgttcagttccaaatttgtgttttttccattgatattttaggccaacaggcagccagggtgcatgatctctgcttgcttttttcaaagcctgtctccatggagtatatctcattatctctgactatttattactactaccagcgagcggctagttttgctgccatcgatagcaacaattttttaccgttaatagctcctataaaacaattggctactctcgatcatgcaacaaatgaaggtgtttcgtatcacctctatcctcaatccctaggacactttgcaagcaacatgagaagaaattaaagaaacaccaagtctcctagcccatgtatatatttttaagtacctatataggagaagaacctgcagctacaatattcctgaactcctcccggttccattgccccatggcattgatggattaaactagaccaagtcacaattaatctattcttgtttgttcttgtgcttgagacaaatagctgtgatttgatggctgctactagtcattgcttactttggacggccggtctccacgggattggtaggagaaagaacaaggctgtagtgtgtctcaaggcatctcagcttctcaagaaccgtaacttatgtaattaacctgcatatagatccaccctaaaccccagggatctgagacaaagtagacttgatttttctgcacaaatggcaaggttggtggtacaaaagtgatagagacgaaacacggtccctgggacacacatcacatgcgtataaatttactttcagtagacctaagctgacccaacgtactactctaaaaaccaaataataatgtgcgtgtaacatcagagagagctagttacatgtgtagtgtttctttaattatgttgcatcattaggtcacagtacgtccttcaaaaacacatatttagaccgcggaacaagcgggttggtagtgccgccacgactcgtgcaagcaacgatgaaacagcgggccggagatatggaagcagccatgcatgcataagcatcagcatggaccagaccgatgcaaactgggaaagcggctggtggtgtggggtgagagttctggtgcatgactctacctagaatttaaatcatgttgagtaattatgaataattatgcatattacagtttaataaaattttggtgagatcatcgcatgcatgtctttaagtgtatatatattaggagagacactacccttaaaaaaagtcttagttaagagcatcgcaaacaatatggctatctcattcccaagctaaaatttaacaattatgaaaaaaaaaatgaactctaacagccttgtcaaccgaatggcttggccaaacttacaccacttctctcctccagccgagctaaaggcccagctaggcacacgtcccaaccgagccgagccggcctagccaacccatggccaagccgcctcattcctccttcttgtgggcggctagccaaaactgatttaccaatcgtggaccccatgcccgccaattttgtttcaattccctccttctctctttgtccccacacactctccgtcactgcacccagattgagtacatgttgcgatcatcattgtcgtcgttagggtcaccattcgctctggccacaccatcgtcgccttcatcgtctagagttccgccattcactgcggacgtctccgttgtcgtctcgagtccctccgctgtgaccgccatccattgttgcacgccatcgccgttgtctggagggtcgtctcctgttctcgacgccgatttccaccaccagtgctacccaaaaagggggagagaaagaggagatgcatgatctcgtcagtggcactgtaggggagcacacaacgttggggttgatgggaggagtcagggaagtttgggaggcggagcgtggttgcccacattgaggtgtgtcaccagccctttccaccggccactagcagtagtgcacttggcccgatctattgtctgcttgcccgccccttattgattcccgccacccacaacaccacggcgcttcatctcgcctcggccacctcgttgccgtcggccacgccgcatgctgttatgtcgaggggagtggaaagatgagggagaaagaagtaaacagagagtgacatgtaggacccaatatcatattggagagtgtaataggcatattgttggagtgaaagatagatttggctctctaattttttgacaagctggccaaatagtgtaatctttaatgtggatagaagactagctattgcctctgatgcagatcaagcaagaaatatcggtgataaaggggtaaatatgtggtggaaactcaatttaggtgaaaatttgtgtaaacactaataaaaaagtagtctaaatccattcaaaataatcacataaatggatgagatgatgtaacacaattatgtaaaattcgtgtccgaacttaactttgtgtctgagatatattactacttttatatctcacaaatgaagtcaagtttggacaaaattatttacgtcattgtaacatcaccttattatctatatgtgtgatttttctaaaaaaaattaaacgtcctttcacttggggttacataagtttttatctaggttgtgatttgcaccatatatttaaagacagttgttatgtaaaagaggcgggttaagacctattatattgtattcctccttatatttgtggatgtgcagtgtgctccaccccaccacttaccacgcatcgcacgagtgtttcagtacgtgcaagcagcctgcctcctccataccgctaccaccacaccacaccacactactctcctgatgactcctcgtgacctcctcggccctgaatgcgatggtcgtctcgcttgtacttactccgtcccaaaataaatacagccatagatattcatgtttagcgttttgaccatccgtctcattcaaaaaaaattttaaaaaataatcacacataaaatactattcatgttttatcatataataataataaaaatattaatcatattatttttttaaataagataaacggttaaacattagatgtgaacagtgctaaaactgcacttattttaggacggagagagtagctagctctgcgcgcgcgtccggtgctccttgattcgcacaacgccatgaggacccaacccgatcggatttgccgttcttgacattgtggcgtaatattgtgcttcgttttgctgtaaaagctagctgtcgggagattgggtcgaatgacgtccgtgcaggcggcgagccggttaatgccagggcgccgttaaatcctcgtggccccgtgcgtgcagtgtgaccgtgccagtacatgcagccgttgcaccaacttccactgttactactagctaaggagtagtagagagtactgtagtaaaggttttctgcgagaattcgttgacaaattaaattccatcatcaacttctacatgaagcacgcactgtacatagcggtggaactagtggagtgcatgtacgagagacatcatgggcaactaatctcgcgcgctaaaacattttgtatagatcggttggttgttaatgcgagtgacacatgtgattgctcaaccagacatgcaaattaaatccactgttccaatcacaaatcatcaatacagaacacagtgaaatccgccgacacgctccgctcgatccgagctcgatatggtcgatcaacaacacatctgcgttgcattcatccatgtttgcatcgtcttcttcttttttgttttttgaaagattattcatgcatccatgcttgctcgttcccggaatcatggcatcgtcgtgcatgtgagccagttaatcaacctgctggtgtgacgaagctcgaatccacatttgctcctgaagggcaaagtatagtgatagacgtacgtgaggcttgcttgctcgtatatgctataataaatttattattaatggtcagcgtggtacctgtaattattgtcagctgcacgatactcctacccccaacgccaacgacctctctatgcatgtgcaaggggaatttgcgagtgagtttactaatccaaagtcaaaattcctcatgtctccaaatcatcattccttaattaacaacgcaatccgatcatttcgtgtataatgagacgaaaaaaaaaattcccgtattagattaaggccttatctagttggggaaaaattttagatttggttgtcacatcggatatacggacacacatttaaagtattaaacgtaatctaataacaaaacaaattacagattccgccagaaaaccgcgagacgaatttattaagcctaattaatccatcattagcaaatgtttactgtagcaccacattgtcaaatcatggcacaattatgtttaaaagattcattttgcaatttatacacaaactatttagttgatttttttccacatttaatactccatgcgtgtgtcaaacattcgatgtgatgggtaaaaagtttatgttatgggaactaaacaagacctaaattcccccgaaattcttgtgttacgaaaggaggctctgaactccgattcatgcaccatccaaagctgtggctaatcaaccgttcaacaaattaaatccaacagttcttaaaaaaaatccgacatgagacattttaagtggagtgtagttttggagtttttttttctcccattggatacaccataaagtgtagtggatcaaggggccgacatggttgatgcgtgtctgatgaagttcataaattctcggagatgagatattgaaggcgcgtacagcatgcgtacaggaagcccattacgctggccacggtacctttgctctctctgacaacgatccacgccgttttatctagttggtaagaatacccaatgcatggattaaaatgaaagcaactttcaatgatctgtataaatttccatggacactatggccttggcatgcatgcgtgtagaaacagaggtacatacacgtacatgtatatatgtaccaatgatttttaatgtgtgtccatgtattcatgtctagctgaattgaatgggctctcaacgaattctctgtcggtgcggttactgtacagttcgatcattcgatatgttttcagaaagctctgcagtaaattaaatcaacctcgtgatttttttttttgttgatgtgacgctcatgttagcttgagcttcatccggaagaactatgaggctggctctcttttagagttgaaagctactacttgagcaagccccacagattgttcgaccaacaaacattctagatatatacaggcaacaaagcgtcaaagcaaacggcttttgatctatgtactcgggcctcgtttcagaaatgcaggaagccatagctagctgaaaccatttctttctctcttctgttttttatccttgttctcgttgtgacagatggtaacctgacggctacattgcacggtgacacccgccagcgccaatatttagttttgtcgttcgtgcagcacgtaggctgataaacctgtaaccgggattactctgggctaaaatatatagtgatatgatcaaaggacatgaagtagagcattagctgatcttttggagtaccactttaatctgaagtaaatttgtgcccatttcacggtagtacatcatctttctcaaagttacttgtactacaatgatgtgctttgtctacgaggcaaaaataagataaactaccaacgattaaaatgtaatgaagggaacaatatggtgccgtttgagtttgatgaagataaagattaagtaaaaatatgctaaacaaaaaaatcatcagcacctaattaataaagttttatttattataaacaataaaaatatatttaaattaatattttagaacggccattatataaaatatttttgaaaagagtatcgtttagcagttaaaaaaagtgttaataaaaattgagatgtactccaatttgtatgttattaatcagagaagaacgagacggatacaactcatgtcctacacctccaaaaaccacatctcgacacagagaaatgacactgagaacaatcaaggtcagaaaaagcaaccaaagtcagagacacaaatcacagatgaacaaggaaagtagagagaaaaaactggacatgttcactcaccggaaagtaatctccgacctggtctctagtgatgtgtgtgcttgtgtgtgctctacttctactcgtctcacggctaatcacctggtatttgcgctccgatttcgctcgctctccgtgccaacgccgcgcaccccaaaacccataaataaaggcgcgagaccacacgcagggccgagccttaaacacaccgtctccttcccccccatggcctccctgccgccgcccgcgccgccggccatcggcggcgacccgctcgccgccaccattccgccctcattgccgtcgccggcgccgtcgtcgtcttcgctcaacctctccccgtcgcttctcatcatcaccgcgctcctcgccttcgtcttcttcgcctccgtgtcgatccacttcctcctccgctgcctcgcgcggccgtcgcacccggctccgagcccgctgcccagggcgtcggcggcggcccaacgcgcgacgacggcgtccgccgtcgaggctggggaggctaccgccgcgtcggcggtggggaggagccatgagggggaggcggcggcggggggtggggaggaggtcgacgacgagaaggagcggctgatcgcgtcgctgccgctgttcaccatggcgtcggcgctggcggcgctgcccaagagctcccccgactgcgccgtctgcctctcgccgttcgcgcccgaggccgagctgcggctgctcccggcgtgccgccacgcgttccacgcctcctgcgtcgacgcctggctccgcaccaccccgtcctgcccgctctgccgcgccaccgtctcgctcccgcacccgccactccccaccgccgccgccgccgccgcctccaacgcggcgcaacaggatcccctcgactcgcggagcagcaacaactcgaggagcttccgcgtcgagatcggcagcatcagcaaccgccgctcctccgccgcggccgacgaccggcgcacctactcgctcggctccttcgactaccgcgtggacgaggaggtggaggccgtcgtgtcccgcatcgcgcgccccgcggcggccaagtcaacgaccggttccgtgacgccggcccccggcgaggcgctggcggaggcggcggggtcgcggggatggctgcgcgagtacgtggaccgcctcgcctcctccgcctcgtccctctccggccggtggagcgggcggtggagcgcgcggtggagccagagccaccacagcaaccggcaggaggactcgtggcggtgggacccggaggcggcggtgatgtcggcgccgcgcggggtggacgacgacgagccgggcttcgtcacgctgtaccgttggatcgtaggcgtatagaactagccccctgtaattacaggacctcacgaggttttttttgtcaatttccttccacattttttttactaggactattttgtaaagagaaaaaaaattccagccccagatgagcttaacgtctctgaactctgaaccttccatcgatttggacaacatcgtcgccattctctcttcccattctcctcctgtcctcgcatcaatcctcgcaaattttggcggtattcaagctcagattgtaaccactggagactggtcattcgttcgttttctggagaggcaattttctggagggggaaaccgggcgaatcgcacacggcaggatgccacgccgtgctgtttgctcctttttccttgtggtttatagctgatctggtcgcggctactctgaagcctggtggtgcgcctgcagcctgtgcagatgtgtggattctgaatcacttgtgttgggtggaatggatccatggccgtggcttagtgccctagtgcgtcgtaggcttgcagtcaaaaacgtgtccaatcccctgcgaactgaggacacaccacttcaggtttgttcgttgtggtgatcctttcttgtgcccagttgaagagtgtaacaaaaaaaaagtttaggacattactgagagaatggattagtgatcctagttggatctagtatgtagacagttttagtttttttttccctttgtttgttgctaccgtagcatgctcctggcttgtctctgtcatggagtcgaggatcttgctaagttgggtagcctgcccggtggtccttgttatcattggatatggttggtgggctggaggcttggtgcaatggtgccaaattgccaatccctcctagtagcatatactgaattcagatttttttctttcccggggaatatgaattcaggttttatcatgtatactccctcacttcctaaatacaactattttttggtacgcggatttcagtgcacgggaatcaaaacattttcaaccaaacaagtgacgagaatcaagcgatttaaaattcgaaattcgatcaacaaaatgactgaaaagaaatcttccctcctatctttaatctctgctatacagtgtaaaaagtgcttatacttaggaattaagggagtatgtgagtctctgagatctccgatctcgttagcgttggtggctcctcggatgtggacctggtgaccaatcatcggattaagtacttgcatcgcgatacctgaacaaatgccaaaaccaattcgatcgtctcgccatgctctcggcttcttctcgcacagccagactgatcgtgttagctcgtcgccaccagcccactaccatcattttctagcctgctactactaacgctaaatctgctactaccactgctaatctgctgctactgctgctgctaccaccaaacacaaccgactggtggtgactgccacccaaggaagaggcaccgtcgcgtagcattgaattggattgacgggtttgagcagtgatcgcagcgttgctgtgccgtcgtcggttttaaccacgcaggcaggggcggcgaccagctgcacccaaccgcgcacttcaccttgaatgctctcatttactccgccttcctaccgaaatcgtccgctcgccgctcgtctcgtgcccttcggttcgtagggaagagtcgcctcccctcgcgtggtgccgtgccgtgcagtgaaaaaaaaaactctctcatcttttcgcttatacttatatctattatattattaaaggaatagaaaaaggagcctccacgttcgctctcatggcctagaaattctcacattaatcggagaaaaagaaaaggcagagtccatatagaaatacaatttagaaatagctaaaattcgaaattaaaaaataaggaatattagaagaggagagtagagtccatatagaaatacaatttagaaatagttgaaattcggaattaaaaaataaggtatattagaagaggagattagagtccatatagaaatacaattaggaaataattaaaattaggaattaaatgtaaggaatattagaagtagagtataaagtctatatagaaatacaattaagaaataactgaaattcggaattaaaaataaggaatattagaagtagagtatagagtccatatagaaatacaattaggaaataactgaaattcggaattaaaaataaggaatattagaagtagagtatagagtccatatagaaatacaattaagaataaaatagaaattcggaattaaaaaataaggaatattagaagtagagtgtagagtccatataggaatttaaaactaactaaaatttggaataaacataataaaattaaaagtagagtttagagtccgtataaaaatacaatttacaaataacaaaaattcgaaattaagaaaaacatgggaagaagagtttaaagtcaatataggaatacaatttagaagtaactgaaattcaaaattaaaaattaaagaatattgaaagatgagtttagagtacacatagaaatacaattagaaataataaaaaattataaataaaaagtaaataatattataagaagagcatagagtctatatagatatacaatttacagaaaattcggaattaaaaaaaataaatattaaaagacgagtctagagtccatataggaatatatatgatttacaaataactaaaatttgatattaaaaataattaataactaacacgtatataaaatacaatatgaatattacatattagtagttttgtaaagttgttgcaaaatttaaaactatgttgtcattttaatatatttgaataacataatgagagaacatatatgttattatatgagagaaaatataatgatgctagccgcgcaatctgcgcgggccaccgtgctagtttatatttatatcaactaaaatttaaatttttgatcttaaatttaaagttaattttaaaatttttttcatcatagtttatttttcaacttacttttacaaatgtataaaagttttagtcatgaattattttttatttatagatatatcgtttctttttttttctcaaatcagccaaaacgatgggcctggcggatcgatcggcagatggtgcgtgccgcgtgcgtaccaatgtgtcgtctctcgttgccatgtcgagttgtggtagcgcctgcgtatcggtggcgccgagtatttatggcacgttgaagtgagccggtttgaccgtacgcccatcaccggtgtgtgtacgcttgcacgctggacacttttgcattgcacgggaagcagggctttctctccacgtccacggaccgcctgcctccctgcagccactgagacacgtagttgcagcaacagcagcgaggtcggactcggacgctacggctgagcgggaccaagcgtgcagaggcattgaatcatccatgaccagcttggaaggaaaaccaaggccccgttcgatccaaatttgtgaaagcttcaccctgtccctgtgcatcagctgtagcgattatgaggaaacgcgtggggttgtaggggaatctgattggcgctgcttctcgttttgggggggggggggggggggggggggggggagagaaaaactgcttgaatgggatcgttttgtccagcgcatgattgttcctctcccggaacttacgaagggactgggattctgaatcaagctactgtgactagggatgaaaacggagcggatagtttccgtcggctccggacaaaaacggatacggatacctttcggatcggataattcttggatagttcggatacgaatacgaatgttttctcccggatatgaatacgaatatggtaccaggtttccgtcggatacggataataattcggatatccgcaggacccatgagacataccccatatctttctaactctataaccttcaatatacctttataaaatatacctttatagattttaatagtagtttatctcttaacactagtccatactattaatattatttaaattttaaaaaatatttataaattataccttattttatataaaatgagctaattatatatgttgatatttgtttctattagaagttgagttggttttcgtgttccgagaaaaaattgtttccgtatttgtgtccgatcatattcgattcttattcgtattcgagataatctgtatttgtttccgtattcgagctatccgtattcgttttcgtatccggtaaaaaatatgaaaacgaatatggtatgagcattatccgtccgtatccactccgttttcatccctaactgtgacaaaacagttgctaacttggtattaaagtcgataaacgccgaaacgacgacgaagacgatgaccatatgcaccagtcttcttccacttgcagatgaaagtggatcactggaagcggaagcgtgagtgacactgacaccatggacgacggccattagcagccgagttagtttggccaccaacttctctcgtctcgctagagcaatcttttacactttaataagcgtcctagcatctcaaacggacgtaagtaaaatacgagccgtgtaacaacgcaaggactgacataacacaagcatggcttttcgcaactaacagaaactgcttggagaggatggcacttgggcagccaacaagcttgctagcagctagcccaattccgtatataagtgaagcgttggtggttagcgatatcgcttatgctgactaaaacagtacctgcagcaactacacagattttgttggtgtgaccatgaatgaagctcagtacacttattattagcacggtagtggtatcgatggacctgggacccccgaggccccaataatgaatatatctctgtaaaggaattaaagggtaaaaagccctgcagagcagacaaatgttagtaataaatatataaactgcaacatctgaataactgagaccttggatttaccaggatgggaaaaaagaacgaaccaaagtacttgtactatttcatttagcaaccgaaaacaaaggtaccagtccatgccatgttaatttgtcttgacctgacaaactgatggtacaaatgtaatgtaccaatcaccaatctcaccacgccagatcaaaagggcacagttcgagggggaaacctggtgtctttctagtagtctactgggttacatgatttgtggtccatattttacaaacacgggcggtacaaataacaatcgtaacaatacatatactacaaaaataataaactacatatactccaaactctgcccaaaaaaacacgcttgtatccgggagaacaagcaaaaacactaaagcgtcagagttgttgaacttagagagaatgaaatcaagctgtaacaagtaatcttagcttcctgtcatgctttatcattgaacttacactctctacaaccaacacggtctgcaaaaaagtggcaaaaacaatttagattcaagtttagaaaggaaaatgcatagtaggacttaggataaacgttttatcatcttacgataacattcagcactaatcattctagagaagttgtaaaacgcaagagtgcttagctaagtactggccatggcaagcatagcacaacaaataatgcggaacatattggttacctgaaggcaagtgtaagccaaaccagtggcaaagtagaaatttgcattgccagtcccctgaaattattgtcatgttagtatcagtggcacacaatactaagagaggggaaggatgggagagggagataccctccagatccacaggttgtgcatgacagggctaaggagagagactccgatatatccaaaaaacaagaagaaagtgaattgcatctctacaaaatgtaaagagaaaccattagtgttgtagtgtaaaactaaaccattagttttctagaggactaggagtcattcaaaatatgttaaaagaaatgttaagcacctgctaattcattagcaaataggcccaaaagaccaagataaagagctgaatctccgaccttcaagataaatcataatatggtatcaatgaacttgtgggaaaaaaatcaggacaacacaacaaaaacagtttgatgaaattttacacaaccgagggactaaatttataggtattatcatgtaatgtgtacttaccgatggatacgatttcaatattgcgacaattgctgtgtaaatgaaggcaaggaagcatggacgatgcttcagacggattgccaatggtaataccataaaaacaatgttcatattgaagactataaggaagaagcttctgaaaaagtcaaagacttcagcaaagaagtacctgcacaacccctttaatgagacaaatggaatatcattgagttagttacataatttgatcaaaactcaccataatacaccaatatttggcgataggtccttaacggtaaggataaaaccatatgtcctgcagaaacacagcacaagtcaataggtaatggcaaataaaaccaattgatttcaaatgaaaagaactaagtatgaactaaggcacaacaaagttgacatgttggagtggatagagcaacatggtgttactagcataagatcaaacatgctaataccagaaacagtactccttaagaaaatctgtcctcgttcctcctttcaaaacttatctttagtgagggaaagtaacataaactagcacagtccccccatctcactcaaacacaaattttcatgagtaccaaagaagcatatatattctactaacaaagagttgagtatcttacttttcaaacatctcctgaagaccacccactttatttagaactatgctgctcaatagcaacacataaaatgtccagaaaagcatccacaatatgaagtggaaaactggtttccacaagaattgttgaacatctcttgagctagaacttttatcattgtctgatacgtcagttttactggcacttgagctttttatacgaaatacttttgttggaggagcatctggaccatatcccaataaaagaatgatctggaaaaagaactttgttctcaatagctgactatacaggtaatggaaggcattatcaaatagatgaatataagagtacaaacaaagcttgtgacacaaaccggtacaatgagaattgcaggataaagagagagatgtgtagccataacatatccaaaggcagcaagaggagcaagacctaaaaattagagacattccaagttttaaacagcatgagaacttgttagacttctatgtcactcaaaagatagatactgtcttcatgaaattgttgctactgatgctttgccaaatgaaggccctttttacataacaaaaatgattctactgaaaatttaaaaatagcagaacatgttgaagagaaacacgaatttgagttgcacttacgtgaacaggctccatatatcattatcacaaccattaaattctcgataggtgaagtacatgaacccacacaagtaactattgcccaggggttccacaaatatatgagggaagcaatatctcctgcacttacgttaactgcaggaacagtatcaataagaacaataagtagctgcataacaaacattaagtaatcacaagatgaaagcatcagactatcattagtaaatgaagaatcactaattttgattcaagtataacgtttcaattttacaccttataagttgctagaatcacagtcatctttaaaaaaaaatcattccgaaatgatgtattaatctgaaaataagttgtttcatagcaattccgtgcatctctattatgaaagactagattggctctacaataaagaatgacaattcaatgagtcaatgaaatatttgaagctttgataatataattctgcaagaagctctgtatgctactccattggtaaaaacaagtagataactagtgtcaacaaactaagaacaactaggtcagtatccaataaagcatattctgcaaggagggacacaaaactgtaggtcctcaactatagtgctcacctgaattactcactgcctctgtgagctcaagtgacttcaagtttctgttgcgtgctatttggagtctacgaccagttgctcggataagcatggcagctataaaatctacggccacaaaaatcaaactgtcttgcattcatgagtgtaatataaattacaagatctccaacatagttcaaaaagataatggagtacattggaggcttcattttttttatttggtctgaatcattacatggtaacataaaaataataagaacataatttaaaaaatcatcatagaaaatccttttcatccatggaaatcaagtggctaatactgttagagaatagagacacagatcctaggtgtaatggaaaaaattacataacaacttatttacctgcaatatatatgatcatgatgtccaacagacctgtaataccatgaaatacaaggatgtgagtatttcaaacattgatctgatattgtgataaaataaaccaatcctgtcaaagcatatagctgcagtagtgcaaccaattgcgatcagagaagcatcatagacaaggaattgatcaccttttgttagtcaatggaccaagaaccaatagaagcaaaggggaaccatgatacattgaacctgaaagacaaaacattcaccgtgctgaataatcacttccagttcatgctacaagaaaaacacattgcaaagagaccctactaaaacatcatggataaacctataacaatgacaaatacctgcacaattatttgctaagtaaaaggtatggcaattttgcgcttattttttttaacacaccccattagtgcgggcttgcagcagttcatgcttaatggagcttactagaagaagtagcacccaatcaatttactttacttttaaaagtgctctcatgtagctagtaattccatccctatactgagctcaacaattcacgacttcagttgtcccccccaaaaaaaagtaatcaagcaagattaagatgtgtggaacgaaccggagtagggcgacatggaagcctgcttcagccagtacccttccgccactgcaaaacacacaggaaaacaagctattagtccaattacggcgacaacacagcacagctcaagtctgggacgaggaggcaggggagcaagggagcgcttacggcggcggatggaggtgaggggggtggagacctcggggcgggaggcgaggtggaggtccccgccgaagagcacgagaacgagccggaacccgacggccgccgcggccatcgaccagaagttccggatcgccatcgccgccgccgctgccgcaactccgatctgcgcacagccaccgcttcgtcgtcacggctgtaaccggagccgcggcctggcgattgggccttctacgccaagtcgtcatggatgtcgcctttgcgtaattgagttgggcttcagcagccagcaccggttggatggcccaaatcatctgcaattcgggagtacctatacatctttcgaaagatttttataatcgtatcatacagatttttaatctttgtattaaaatctgatagatataataaaaagcaaaaaacaattaagaaacaccataatgaacattaaattaccatatcctcaagaaaaagaccaaatcaaatataaaatttaaaatttacatgtgaagattcaaaaattacagtgtaacttacaaaagttacagtgtaagtttcataaattacactgtaacttacaagaaaatgcactgtaaatttgagtgagaaaatcgagtgagagataagaaaaaatctttcgagtgagatatagcaaaatcgattctttagtgttaaggcccacattagaaaactttggaagcccgacctggaaaaataccagcacaatgttttagagtggttttcaccaacaggcacaaaggttgaaacgggaaaatatgtggtgcaaaccatatatagtggaaacttagaaactaccgttggatcgagaaacgacgtcagagtttcgtccacgtcaccatgagttaaaatttaactcgcagattcactcatgagttaaaatttcactgggagttaaaatttaactcatggtgacgtggacgaatctcgaacatccatttctcgatccaacgatagttttcaagtttccactatatatatggtttgcactacatattttcccaggttgaaactgtgatcccaagttccaacttccaagcaaagtacacgtgtagttccatattgtattactacattctcataaaatatatactagtaatctaaaatcggattagatataacataatactataatctgaacatgtagaatatggataggaagcacatatcctaattggctagtagtatggatttagacagacaacacatattatatattatagtagactagtattacgggtctagacataagtttattatctatatccatagtacgtttaatccggtttgctaaaatcttctacttcaataataacccatatatgtaaacagatactttttttttaagataacatttgtgtcccaaaaaaaggaagcacagatcataaaaaggtagacaagatcgaatcaaacttctcaaaataccataatgtcttgacgatgacaagtagggtctggtacaacattattttattttagcaaacttataaattattaagacaactattatggtattatcaaatcttgcccgcgtattaaaatgcccaggtctcgcacgctagcttctgatcgaaaccgtctacacgcagtcgacgtctacgcgacaagccgcgagaacgtacgccgccgccacaacacaatcccaagctcccaacctacgcaagctcaccatcgccggccgtcgacccaatcccagcgaccatgaggcgtctgctcgtcccggtgctcctcctcatgctcggattgtctacctgcgagtcctccgtgttgcaggacacatgcaagtccgtcgccgccggccacaagtacgtcacctacaacgactgcatcaaggccttccaggccgacagcgccagcgccaccgcggccgacgcgcgcggcctcgccgccatcgcggccaggatcgcggagaaggccgccaacgccacgtccgcgcgcatcgccgcgctgagagccgcggagaaggacgcgaggaggaaggaccgcctcggcgtgtgcgcggaggtgtactcggacgccgtggaccagctcggggagaccgccgaggacatcgccaggggcggggacgaggccacccaggacgcggtgacgcagctcagcgcggcgctggacgcgccagggacgtgcgaggacgcgttcggcgaggccgacgacgcgtcgccgctggccccggaggacgccgagttcgcgaagctggcgaccatcgccctcgccgtcgctgcgtccctctcgccgccgccatcgacaccggcaaccatggattgatactgtctattaatcatcgtgattcgcgcataattagaaatttagcatcgtggactacattcagctataataaaagatttttcgatgatatgttaaattttttatgctttacttggaaggattttgtccagtgccttgcatgttacgcatgcaacgtggtttagtgggcgagtagccagcttggaatctcatctcgcgctttttttatactccgtacgtggtatgtctttgaacgtgggtgctagctgttttctggaagtgggagcgttgagtggaagcaaggcgtgctgccttctgaacagcacttttgcctttcgccttcgctcccttcttttctatgtggcttgttggcatatattgctacaaaattgtactggtaaatatacagatatatattgatctgctgcgaaattatgatttgtgtatcgttctggattatttggagttttaagtagtaccacgtaaaggccattcggtaattgagcagagcagcgctagatgttgatctcaagaaagatatatgcatcagaagccaatgagagtaatagtgccattgatcatggattcatgtcttgacgttcaccggtagccagaaactgaaagatctaagccagctttcttaccgcatcttgcacgattcatgctcttgatggcatcgtctatcgtcttattgtttgggtgcgtcgaacgtaactgaggtggcagcactatataatacccagattagagcctagctcattggttagatttggggcagggggagataatcagagaaaaaccctcacgcgtcgctctcccaggggcggctcaggaggcaacgacccggccgcccctctcccccacccccacccccttctccgcctcgccgtcgcccgagcggccgccggcgaagccgcgcagccacaaggacggcggcggcggggcgctcctcgtctcctcgcgctcgggcggcctggggagccgcccggagtggcgacggcggtgtccgccagatccgcgccgttccggccggatctgacgggatgggctggcggcggggacgggcgacggtggcggtcgaggtgagttgcgcggggtggtgttgtgggtgatggcggcggggatggtgacggcgttggggtggcaatggtggaggccgcggatccggcggtggcgcacccggatccggcggcggccggtggtggccagagcacgcaggcaccccgcggctgccactggcgtcctccggcgcccctctaggcgtcggccggcgttggtggagaggaagacagccggatctggctccttgcccagatccggcgcgtcctcgggtgggaacggggtggttggagtccggtcgtcgtgcaggtggtgtgaatatcgcaggtatcctcggtgtgcaggtgacatttggtggctcctgtcgtggatgctatggttgatgggtgctccaaggcgaaagtcttgctccgctctcggtgctagcaacggcgacacccttggacgccgttcaccttcttgaaggcgttgctactggagccctcgttcaactccacttcaagagttttctccgggtgaaaacctagattcgttaggatcggacgatgtcgtcgttgtcggcgtaaccttcttaaaggcttcgttttaggagtttatctcttgttggacggctgtacttaggttcggtttgtcaatgtcggggtttttgctggttttcctttaattaaccgtgttgttgtaaggtttttgggtccggtttcccttataaactggatcaactctcttcttctatagtgaattgcaggagctccctgtctgtcccctcgaaaaaaaaagatttgggacaggggaccataagcttagagggggctcagagaaggtgagggatcgacaggcttgcagcattgcagagtgcaaagagagcccgtaattagcagttttatgaaaacgcaaacccccaaatgaaaggcaattccaactaatctgaaaattctgatgaacctgaggatactcgtctcagtgtgtctgtgtgcgctctaatcttttctcctttttattttcaaaaaaaatcttttcctacatctgggccggcccgtcctcaggacgtacacgttctgccgtttgcgatcggtgtctgccgtttgcacgaatgaagcaggcctaacattcttcttccgagagacgtggaattatgaaggaataagttcatctgaagtctcttaacttgtcaacgaatccgattttcgtcctccaaccgaaaaatcagatacaacaagtccctcaactgtcaaaaccagtgcagataaggttcctcagcggttttagctgacgtgacgcctacgtggctaatctgactcggtctccatttgatgtgacactgacgtggcgtttacgtggcaatttgatctaagaaaaacaataaacctcgtgggacccacatgtcagtttcacacataaattaataaaaatggtggggcccatgtgggccccaggtgtcattctcacccatcctcttcttcctcctctttccctatctcccctctcttcctgtctctcctctctctctctcaggcgtgacggagagggagcggcgcgcgccggcgccgacgggagaggatgccgtcgccgcccatggcgaggatgccgtcgaggtcggagggcggcgtggaggacggtggaaacgggggcgggggccgcgatggtgagggcacgacggattcgggccaccacgcctgtcccctccggccaccacggcggcggcacgcccttctcaagcagaaagcggcgctgcggcgggtcgcagtgctgcatgagcgccgagagcaacgaacccagcgtggtgtcctgcagctcgtgcaggaagtgcggccctgccggcgcggcgccgccgacgttgccgtcgcaccccggcacggcattgtcgccaacaaattgtcagcctggtacttgacgatggcggccgggccgttgcggtcgaagcggaccttctccttccaccaggagcggaggttgtcggaggcgctgctcaccggcttgcccttctccgggatgatgccgtacacgaacccctgcgcgttgcacacctccatcatcttgagcatgtacttgaggatcccgtcttgctcctacgactgctgctgctgctcatgcaagctccgccggcgggaggtgaagagaggggagatggggagaggagaggggagagagatgaagagaggggagaggggaggaggaagaagaggagggatgagcaccacggcgatgttgagcaccacgagtccacgacgaggacccccatgaagaagccgaagctgagcacggcggacctcgacacgcggagtatctgcttgactgcttgccggaggcatctagtagccctgcaaattaattaatcagcagacgaagataattaatactcctagctaggtacgtacgttgtcgacgaagaccgttccgaagttgccgacgatgttgatgatgccgaagacgagtccccccgagctgagcatggcgaggtaggagcccttgaagttgccggcgacggggccacacgcctggccgttgcgcgagaggtcggcggagcagtcgcgagcggcgctagctggcgacggccatgaggcggtcatacaccacacgcgggctggcgagtgtgtagacgacgacgccgagcgggatgaggaagctggcggcttagatgtctactccggtgaggccgttgacgacggcggagccgccgaggaggagcatggcggcgtggcgcagaggagagggggagagaggaggggtaagaatgacatcccgcgtgggccccacatttattaaactaatgtgtgttaaactgacaggtgggtcccacgaggtttattgccccgtaagcgccacgtcaatgccacatcagatggagaccgagtcaaattagccacgtaggcaccacgtcagccaaaaccgccatccaaaccgtcgagggatctcatctgcactggtttttgatagttgagggatggattgtatgttgttttacggttgaaggacgaaaatcagattcattgacaagttaagggatctcagatgaacttattctaattatgaacacaagtccaaatgggcttatattactggattgttttgttcagggagagaaaagcccaaatcgagagtgcgtagcgcagcgaggaacgtgttacgtggtcgggacaccggagaacccaatgcagccagccaggcagatcgacgaaaatctcgaccatggacgggcgtcgtttccggcggatcggtgtccggttctcagcatcccattccattcgatgtgtgtcctaactcgatcgtgatctctttgctacagcaacacaatccaaaaaaggccctaggatgacgctgatgcttcgtacgcgatggaactacactagagtagtccactcgtgtcggagcacttcccgggtggatagcatacgatcgatgttccattacgtactattgtgcggcacagctaatgattgtacatgtatgaagtactttcttagcaaaatttgttcatagatactttcaaaaattttggtgttggctaggggacaccgttaaagcaaaaaaaaacttggctctttctttttactatataattcctccgtctttaaatataagggattttttcttccagattcgttatattatgatatgtcacatccaaccaaaagtccaaaatcccttatatttagagacgaagggagtagttcaaaacttatccatgttcgctacgtctatcacttcatctaagccacatagttcaacacgtcatctgtcaccccatgtgaacaaatcatcgagcagctgccgtcctcgcaccacggctcgactaactgccaccgccaccgcccaaggcagaatcttgcaagctcgacaacgccatcgcccatgtcttctcccactccactcggtgccactgctgcttcacttgggccgcactgcctttgctccgctcagtgtctcaacttcatccgccagtggggaaaggtagagagaagagagaggggagatgaaaagtgagaggagaactacactgtggagcatgtatcctttcaggggcttaggactaaccaacaaccaatactcggcaagtgcggtatctacactgctatcatcctaacagggtaaattcgaggtggcgaccggtgagcctcaccaataaaagcttatgcgtgggcagcccgagtatttttgtcatgcattaccattagcacgtgtcaatgggagcaaattaaattgggagtaaggtgagaaaattattagaaagatgtgagaagtaaaaaggatcatacattctaagggttttcacaaatagcttaagttgatttttttttcaaactattttcaaatcgtcaagccaagctttagcttacaattagcattgctatgataccaactgctgtgggcaccacacgtaatatattgtccagtgcttatcgtgactaacacatgtatttggatctacgtgtgttggtcatgttggacacactggacgatatattacttgggatgcccacattacgtctttgctgcgatcccctcttaaggttgtgttctttagggcctgtttggtacaactccaactcctaaatttaactctaggagttaggtctggagtggagttgtggagctgtctaaacccagctctacaactttcattttgtgagagagctccacccagctccactcctagttttgatggagctgaaactgtttggctgagctctagctccagaaggggtggagctggagctatgacaaacaggcccttagttacccctgctgcagcgccggtgcaagctattggattcatccgctatgctgactcaagcgggctagcatccccttgcagcccgtgctgcccagcgttgttttgtatcccatcatcatcgtaagctcagtcagggactcaggccctgtttctttcagcttaagattattataatctatattattgagtcatattactataagctagattgttataatctgtagtagaataagcggttagttgtttcttttctaaattattagagcctagattattgggtttgcaagtctaaaaagggagtggggtggcatggtgggtaatttttcacccaataatctggaaaaagctcacctaaatgagcttatcggattataataagctggactccagattataataagctacttcaataagttgtttgtttctttcagcttactcctaataatctggattataataattctaagctgaaagaaacagggcctcagggtcatgacgccatccatactctgagctatagatgaaccgagtggtactgaggtcatttgataatgtttctgtgtccaaaatagcaggaaataatataacaacgtgtgccataatcgatggcaaataatcagaattttggagcgtttacgaacaaaataagttttgcgaaattctcaaatatcgtttagcttttttttccctttttttgcgtgctttctgtggtcaaatttggagtgccaactatacatcagttgggctgatcctcactctacctgaaaatcattggtccacccagaacgaatcttggctgcaaagttggaaaaaagacgtttgaggctcgttagctactcgagcttggtcgttacatgctttgattcgctcgagcctgctctgaagcttgcgagctctgaccagccaagctcgagctgttcgccaatagcccctctcatctaggctcttttattgtccgttggctttgattcttcatgttaggtttagtcccatatcaataattgataatgataaaatataacttaaaagatgaaaataattgtcacctatcaaattagtattttagcctgtctaaagttatgaatccggttaattctacaataaaaaatatccaatatgttctgagtggtccatggtacactccactttcctcatgttcacatgttgttggatggtctgatagctaggactagctcctccaacccactcggtgcaccatttcttgttatttttgtaaaaagaaaaaaaaacactagttacactagttgttaacaaaatagaccttcggtagcatatttatggcttattcgtatggccacttcatccggctcaaagcggttcgaataaatgtatggtctttgaagaaaatcgattagggtatattttaaaatttcattctacttttgagctttggtgcttcacgcttcacggtgctgatcgattagggtaaatccaattcatgcccgaaaaggaaaagaaatgtctaggctcggctcgatgctgtgtcaagctcgagctcaggcatgtggtcttagggctggacaaaaaactcgttactcgttacctcgctcgctcggtttggctcgactatgctcgttgtattttttaaaagagccaagccacgtataacgagctagctcgatcgagcttgcgagctgctcatgagcttaatgagctagataggagagacattaacaaaacatggcccataagtataactcaacttgctggcccagaaagagaaaaatcagtccatcccgtgctaggcccaaagaaaatgtgcaataggaatgtccaaaaccctagtagacttggtcaatcagtccccttcccctcattctcgatagatccagattcggcatcggcaacagccgcccgtgcgccgcctgagccgtctgcgccgcctccgcacatcccacgccgctccctccatcctgagccgcctgcgcactccctccatcctgcttcgccgtcgcccgtccagcgtccagtggccgacgctcgctgcttgccggttcatgcccaggaaccagatggccggtccccaactgcggagctacccacgccgtgatgctcactggtcgctgtcggcctctcgatgagcaacccatgccgagtgtccctgtgcatcacggaggaggaagacgaggtgcagccgtgtaggtgtaacgtactaacatcctcctgtgatttgttcaactgatgattcatttgttgaacacttgactctgtgattcgttgcctcattactttgatacttagatacagttgcatacttggatttgaacgctggtttgataatctgaatttttattgcaaactttttggttttgttgtattggctcgcgagctgaacgagctagctcaagctagccgagctgatccagtcttctagctcgttagaataacgagctggcttggcttgttatcctagcaagccagaccgagccgagccggctcgatatccacccctatgtgggcttggtcgagatcggctcgttttagcccctgacgatagtaaaacaagggatcggtcggcggctcgcgaagcgaaagaaggaggaggcagttttcaattttcacacgactgcagcgccccaccctttcctactctttttatttccccacttgtcttcccccgtgcggcgccacacctcttctcatcttctcctcctatcaactccctctctctccaccgctccgcttgcctcggatcgcgctcgcgctcgcgcggagcagcgcccccaacgacgggcatggccggtgacagcggcaacagcgacggcggtagcaaccgggatgaggaggtccagatacagatcgcaggtcaatcaaatctttcccccccttcctctgtcgaaagcctcactgtttagctatgtccgattttcttcgttgagggagtgggggtgaggaggttagagtcgtcttgcgatgggcggcggtaaacgcagatgaaatgaactcgttcgttctctcgggcttatttggtgttcgatggtgtggggaagtaagcccgcgaggtgttcgatgaattgccttctcgtgcgtggcgtgttggatatggccatatgcccatatgggatttgttttttgtttatagaccatattaacttttcagactatcgtgacatcatcgagtggcagagtaggcatgtgagtttaattggcaaacccctgttgttcgcgtacatgagctggataagtggttgatgatagcaccagctatagtaatgcactgcatttaacaaaagtaaaatctttatattagtttttttatattagtgcaggatttccctgagattccaagtaactcgctttcatttgatagtttcaccaatggacaatactgtaaggatggagctatagtcttgtgttgctcgactttctctcaataaatttagagcttttggggtttatatggccaattgttggggggaaaaaaaggagaggagggtttcacttcactatgggaactttggtagtctattttgaataggaaaagaaagtttcagttggccgtgctatgcttaacacatgaagtttgggctaacctgttgatactgcctaccttctgtaacttgcagattcatccaaagctgcaacttcgtcaactcatgaagtacctatacagaactctcctgtcaagagttggcaatggtggctgatggtgggagttaacatgttcttcctcattgccggtcagaccgcatctacacttcttgggaggttctactacaatcaaggcggcaatagcaagtggatgtccacattcgtccaaactgctggctttccgattttgttcattgccctatttcttttccattcaaagacatcttctacacaaacagtcactagtagtcctgcccctacaatttctatccccaaaattactctgatatatgttgtcctgggcctcatcattgctgcagacgacttgatgtattcctatggcctactatatcttccggtctcaacatattcgctcatctgtgctagtcagcttgccttcaatgctgtcttctcatatttcctcaatgctcaaaaattcacccctctgattttcaattccgtagtcctccttacgttttctgcttcactccttggagttgatgaagattctcagggaactactagtatatcacatgggaagtacattttgggtttcctgttgacactaggggcatcagctacatactcgctcattctctccctgatgcaagtcacatttgagaaggttattaagagggagaccttctcagttgtgttgaacatgcagatatatacagctctcgtggcaacattggcttctcttgttgggttatttgcaagtggtgaatggatgactttacaaggagagatgcatgcattccagtctgggaagctgtcatatgtaatgacactgctgtggacggctatatcttggcaggtagcatcagttggagtggtgggattgatctttgtggtgtcatcgctgttttcaaatgtgataagcaccctagctctacccatcattcctgtttttgctgtgattttctttcatgacaagatggatggagtaaagattatagctatgctgatggccatttggggatttatgtcatatggccaccaattatatgttgatggcaagaaaggtagaaagactacagtcagtgtagaggaaacttcctaatcatcacaatgttgcctagaatgccgctcttaccaatttaagttgttggttctgagtaaggtactgtagttattaggaacctcatcaaagaaattccatttttgcaccatttggtatataactatacatattgtcttgattactctgatgtaaggatgtatcaagcaagagaataaattttatgtcacccccaattttccttgtcctgtggagtagtcaagtcgatattgtggttgtgatttttggcacgcttggcaagttgatactgtgccattattgggtttgattcaagtgtatacagtcgaatgcaggttcaaatatatgttatcagtgtctatgtgtatgtcaaacatccagattggatggttatcacaatgacttacttggtgatgaaatccaatcataagagggcgacgacgctcgatctgctgatagctctggccggctcataaaaatattaggagaattgaaattgagcaggcgaaagcaatgggacaagaatcagccaaagacgccgccatactgtaacgccaccaggagttagctcgccaaccaacagcttcaccgcatctccttgattttttttctcgcgtctaatttgtgaacaaaactcggaacgggacggccacgacggtgacggacgcccaaacgggcaacctatgatgaccaattttgctatatatttgtcgacaaattttctcttaaaaatttaacactataacttatatgtaattacactataactataatataacttataatataacttgtatgtaactttcaaaaatctctccataacatattattttggtaaaataaaggttgtgggaacaattttttttcagatatgtgtgtactgtgatttttttttcttcctcaccaaaacaaatctttataatagatctaataatttaaaattacgtgaaacttacatgcaagttacagtgtaattacatacaaattacagtgtaattacactacgattgtactgtaattacatctgtcaaatttttagaagaaaatttgtcgacaaatgtataggtggtcccatgatgactgctgaggtagagtgggccatatacgggtcgaatcttcttcgttgcttttgcacgagcgatcacattcggcccattgagccagtcagccagaggaataagttcaccggagatccctcaacttaacaacgagattttttgagatcccttaaccacaaaaccagaaatctctacccctaaactatacaaaaccgttcactcaaggtccctaggcagtatatatgggtggtttcactgacgtggcatactagtcagaaaaaaaaaattatacgtgagggccacatgtcagctgcacattccttcccttctcttatccttctcctcttttctctcttctctcttctcttcttcttcagtgagggatctaggccggcggccggtgggcggagcggcagcgggccggcggtggacgagcgcgccggggcggcgaggagaatggcggagaaggcgagtgaggcgggcggcgaccttgctcccgttcgcgtgcgtggagttcttccgaccttgctctcgtccggcggtgcgtccagggcgcgcccggcgccgtggagttcctcttgtccgtcgtcaaggggcagcacgccaccaccgtggacaagacgacgtccacaccgctggttcgttctttctaggaagagacgacgtgcggcgtgcaggattcggcgaaggtgagctcgccggaggaggcggctttgagcatcctgcatgcttcagctctcctccttcgcctgcttccgcgccgaccccactgacgacgacttcatcacgccattcccatacgcgtcccacccgccgccctcgtctcctcagccattgccgccgctggagcttgagctggtcgtagtagagcgcggtcagcacctcctaaccacaaaaccgttagtggtgtgcatgcatagcttagttagctgattagttagagttagtcaatacatgcatgtgttgcatgagttgtgtggcagttagcttcgtgtatgcggctagctagtggctgccaaattaagtggatcgcgtgctgcgtgcgcgtacgatgtggccgaagtttgtgttcttagctataaaagtcatgtaatctcggcttccggcttccggctccggccgttcacgccgcccgaagatgatgcggcgcacgttgtcgacgttctggacgcgctcaccggcgccgtcgagcgcgatggtcagcaggtcacccgcggtggcctgctcgagcaccgccgccacgcgcgcggggctccaggtcgcggcacgtattgggagccagcaagagatgacgccggcgaaaccacccaccgctccacccgccacccgctgaccgctccccgccgccggcctccctcaccgaagaagagaagagagaagagagaaaagagaagagaagaggaataacagagaagaaaaaaatatgtacggctgacatgtggaccccacgtattcttttaattgtttttgctgactatgatgccacgtcaacaaaatcacccatatatactgcctagggaccttgagtgaacttattcctcagccagactgctcccaaaaaccagaattcccacgcggccactctgaaagaggactcgcaggaaaattgggaaaaagtatattgaatgtccctcatcttgtcatcagattacaaaattgtccattaaccgcaaaaccgggtcactcggggtgtttaggcagttttgacaccggtttcatctgacgtggcaattaagccagcgtagcacctacgtgggccccatatgtcaatgaaacatcccttctttttctttccccctctcccgtctcttccccatcctcgcgtccgcactccagagtggcgcaacgggcagcggcgagcggccgctaacccacggaccccgacgacggcgtggacgatgggcggcggcgacaagctccattcctcgctcccctcctctagctccctcttcctcggcgtccccggccccttcccttctctccaaacgatcttgaggaggagcagcggcggcaacctccccgctgccatggaccctgacgatggggcgagcggcggctgacgagctccatgtgcacccctcctccacctcctcccatagtgcccccgccccttctctcccgtcgatcttgaggaggagcgcgtggtgacggacctgggactctctgcgtttgtccacagttacgccgcctaccttgacgaccggctcgagatccgcctcctcctcccaccaccgcgctcgactctggccccgcgccgcgccgttcctcgtcatcgacagcctctcccgcatccacggcatcggggagacgctgctcatcgtcaaccacgacagcgccgccgcggtttgtccgggacaggcgcgccgcgacggtggcgttggagtagacgggcagctggccctccctatgctcccccttcgccttcccccatgctcccgccgtcgccaccgccggctgtcgcgcctcctctcctgcctcgccccgccggcctcctccccaccaggcgcccccctgcccaaacgagaagaatagtgagagagaggaggaggtgagaaaagaggggaaagagagaggtgatgacgtggatagtctaacaggatgggttcatgtggtcccacgctgattcagatactacgtcggacgaaaccggggtcaaaaccgcttaaggattcagagttagccggttttgtaagataaggtatgttatatatctgttgtttttgcggttaagggatgattttgttatccgatgactaagttgagggaccttcggtgtactttttcctaggaaaagccactcttgagctttactgtgcggctgaacggcccatttggcagaaggcccaagtggctcgtgtgttctacgcaatagttaggcccttgtacaaaactagagaaaattctgaatttctgacgaatatatgtgcgtgtagagcagttaaccatgaagttggtattccctgatgagtttgcacgacccgtcaagaacagatatcgatcacaactcacaagcttttccggcccgtccaagaaatattgcagtctttccgttaagaataagaagaagaagaagaagaagaagaagaagaagaagaaatgttgcagtactgcagaaatcaccaagcacagcgtaaggattctgtctcaccgaactgtccgtccattttgcagtacaagactacatagtttgcagaaacggagaaaccaactggaccgctgccaccgaaaatggagaatctatgacataaatactctcaacagccagtttcgtagatcgtgcttgggtcatcgccatgcgctggcgcgtcagcaagaaggttaagtgcaactccatttgtggtacttatcatggatggtcctaatacagttctccatttaagggcttgttttgttgtgaacgcatcaattagcgacgcatgtgcttgaaatactttgctcatctattgcgttcatacgtacatcatcaacttaacaactgtaaccagacgcatttatcctcgaggttggtggaatggcgaccatcaccgtacctgtccctggagatgaagtactccgtacatcaaacgccagaagattcttctactccacggaagcttcaatcggcctcacacagtgctggatcagtagccttgccgtgcatgcaaccaggctagctttcacggttccatgagcaattgagcacgcaaaattagcccacgatgctgccatgcttaggatctcaattaccaggtcgcaagaaaaaaatcattctgagtaggcggtttcatgttgtcctggaagtacaaaaacaaaaacagaagagcaaaacgtgtttttcattctccaggagagcaacgatcgatcgagccacggtgtagacaatgtcccaaattaaaagagagttgcgtgacgtcctacgatttttccctggctcccaacaaacgcttgatccgtcattcaatcaattgcgtaatcacgctcgctcgggacctgaagtttgttgcgcgttggcgacgaggcacttgaccagcagcaggccacagcccacaggggcaagtccatgtccatccttcgccgcaaagcagagcaaaaggggagcagcagcagcagccagacagccagccagccaacagacaccgggaccggagagatcgaccgatcgatcgaccaggtcaggcgtggtgtgccccggccgacaagaggctctggctcggttcaccgctcggcaaacgcaagcccgggggcacgggccgccaccggcgcagtcagccaaaacgcacgcagaaacgcgatccaaccaccgcccgatcgaggcgcgcagaaaaggcggagcggatggcgaaacgagagggttacgcactagtacgcgcggctgcgtcctggagcgcgggtcaaccgtacgtgacgccgcactagctagcgagtgctcggctcatcatcacacgcgcccccaccagccaccacccaccacaccgccggtgaatgcgtgtgccacccatcgatcgggcgcgccgtctgccgttcacatccaccgcaccgcgagggccgcggctgacctgagcttaacgcctctcggggtgaggattatgcgcattaggcaagcttgttcccgaagcgacaggcaggtagcggacggcagcgtcctgggcgggccagtggtgccgaaatgcaagccatgattgcacacttcttgcgggtttctattgctttctggtgtgtgctggaaatgtatgcatgctgatttttatttttcgttgccaatgctaggctgcctcctttttatcgataaaggaagagagtttatttctagaaaaaaaaggggacttaagcatattccctcggcaataggtgatctataagcttccatgttctggacttctgaccaggcaccaaaatctgtgatcttcgttttatctttgctactatcacaataggatttataagttaaaagagtcgggcatttcgcacttttcaaatttactagctcaccatttggatcaacgagtgaagcgggctctttgaagctcaagtgtctgtgcaagggacactctcctcttatccaccatgctcattactctctgtgttttatattacaagacgtttaacttttttctagttaattttttctttaaatttaatcaagtttatagaaatgtatagtaatattttcaaaacaaagcaaaaatattatcaaaatatatttaatgctagatttaatgaagctaatttgatattttaaattttattgattttttctactaacttagttaaacttaataaaatttgaatatgaaaaaaattcaaacgacatataatattatgacagagggagtatgtcccgttgatctattcttaggtttactagcgcccacatcgctatcatcctccaaattctctgggagaaccgagtctcttccattctcatcctccaaaacagttgggagaagaagaagaaaagccttgattgtttgatcgtggttttatgagctgtgaaaaagctaacctacgcaataatgataatttatatacaaaattatattttaagcaaagaaagccaatgcagaaaaaataaatgaaagaaatcaacttaaatttaagttatacggggtaaaagtctaacttttgctgcaactgataatacgacaagcagatttccatgggaggcgtcattaaaaggacttactgctagcattttacataatcaaattgcgctccctccttccaaataaattactatgagaataggcttatttcatattttggttttttcaaataagttggccatatttgtagtttccatgtacttaagatttaaatgaaaagataaattaaatgtttaatcaaaacatgagaaatcatcttaatattcattggttgcatgcgtatatatgctatttaatttttgttatatgaaagatagattatttttttccttaatcctcagtataaaaataatatgtctaacccttttgatggggggagtactttgcaagtacggttgtggagagaacatatgcaggttgactttttacatattgcttgcacgaagagggttgacttggcaactgcccagtggcatggctcttttgctcttttgacatcatgattattagtactagtagtattcatagaacatactccttccgttctaaaaaagataaatctttggtttccgtgtccaacgtttaactgtcagtcttatatgaaatttttttataattagtattttcattgttgttagatgataaaacataattaatactttatgcgtgacttatctttttaattttttttataattttttttaaataagacatacggttaaacgttgtatacgaaaacccaggttttgattaatactttatacgtgacttatctttttatttttttatttttttttgatggagggagtagagtccgatagaaaaggcgaaatacgttgaaaacaaggagccgaaggcgaatcaaaactctgcctgcactgccgctacaattccagtgatgatgcaaagctcacgttagattagcaggagtaacattcaaaaaattatatatttttctaccggctccactggataatactactatatgatccagggctaattcaaacagagagaaaaatattagcacagcaattgaaaagtccaaccttctattttaattaacagaaagtgtaacgggtgatcttaacaagagtgagccacatctcccaaataatatatttgcttagtgaagtaggagtactagctactggtttgatgttgtttattagcagcaactcctgtactttggtatgttgatggtaccatgagcaaaaacaaaaggatgaatcctaccaaagagctggaagattggagtatataaagttaaacaaacaaataacttgttgcaccaggagaaagtaagaaaataatgcatgcaactaaagagctggagagagtgggacagcatgtaaagcacaaaatgtagcatcggagtgaatttctattcacaactttgcagttgcatgttataatttgtaccgaaaccttaagaggaatctatcaaaacacaaaatgttgcagtattaagctagctaggagaatccaaacactaaacagtgcatgttaacagttaacacgtcataatcagccaccagtcacaacactgcccacacgaatacaacatcatcatcatcacatatgcacatcgtgggcagcccacaagtcgccagcaagacctgaaatgacctgaaatgaatacaaagaatcataccaaatcatctaaatcgatatcaactttcgtataatcgaaggaaattatgctcgctaataacaggacgtactcataacgaatactatgtttgtttgtgtacatcttccaccgtgccatcaagaaaacgaatactacaatctcatgatgtttgtctattgtcacggtagtcaaggcctcaaatcagaatgtagttatcgcaatgattccactctctaacactgattaattgatttgaaagggatgaattaaagtggttgcatcgtgtcatgctagtagaggaatgcatgttctttcccccccccatcaagtttttctaagatttagcagcgtatttttggcctgtgcgcaccgtgttgcacagagcgcttcaaatatgttgttttttccccatctgtacgtggtaactgtgcaaaaaatggaatgagcagatactattaacttcggtatgcacaaagaggttgagaccatttaattagtatggtttggtgcaccagaaaagggagtaatggaggcagaggcagccatcgcccataaatacgctgcctgcctccatgtgaaagctctgaccaaatgaattgaattgatgctatttcatggagtattcatagaccattggatcagattcagaattcatttcagacacaaaacaatcaagaaccttcttttaatccctgtgcacaaagccacatacactcctatccccctctactcagatccctctcactcataaatccagcatttaatcctgtgtacaaacgacctgtaccgtgcagtccatgcacatcaacaagtccactcattcttaaacccaagcatcaaagaaaaaaaaaagaaactaaggttaattaacaattttgcaaatcaagattagacaactagctgtacaaacaaacaagcagctcttacagtaatggtcggctgacgagcagtagtaacctatatgtcaacgaagtggtttggagttgggagtataaaatcttatagagacttttcatggatggacaaaatgcgagtaagaaaggagaagaaaaatctaaaaaggatggtaattgggattaggtggtgataagcggtgaagagaagatgaaaaaggtgaaaaagaaaacgtgaaaagatcaccggaagcgtccgccgtcggcgagcttcctggagcggcaccgagtaatggaggcggcggaggagaggttgtggagcggcgatggccgtagctcgcaggagaaggtgcctgggtcgggcggatgggcgtggcggtggcggcgcccggggctgggccgcacgagagggctgaggcagacggcgaagcccgatggcatggtgctggtttggcgccgccggcatggggtcctccgcatcggtgaaggagatggctgccatgggggatcagtcggcgagctgctctcctcgtcgctgccgtcgcagtcccgctccggcgagagcccacggttgctgaccacgcggcaggagcgcctaggcgggggcgacgaggcggctgcggctgcggctggcgctggcggctgcttcttgcggcggcgcggcatgaacccggcgagccaagaacggtttctgctctccctgttgtcgcctcccttgtccttctcctccgatctgtgatggtggtggtggtggccgaagagcgtggcgatgacggagaacttccccgcgcgccgcttctcgtacccgatgtccccctcctcgagcccgccgctgctgccgtaggcggggccgacctgcggcgtccggaagaagaggaggctgggatgatgcttaagcgcgccgccgcccgaggaatccgacttcctgcgggacacgtacggcgacaccgacctcgggaacgccggcgccgccgcggccggtggcgcagccggaggaggaggcgacgacgacgccccgttctgcgcggcggcgagcgcgagcaggcggtcgttgaggcacgtggcgcagacgccgccgcccgcctggtacgggtgcttcttgcacctcatccccatctcatcgactcatctcgccgccgtcgccgccgccgccgccgcgcgctccggccacgaggaaggagcaatctacaacggcgcacgcgcacctgccttccttcttccccttcccttcccttgaaatttgggcgagttttttaaaacggagattggtgcgcgttttggcgaggggatttttttttcctcttttttttcggtccgcgacgctgcgtccgcgggcttaaataagcttcggcgaaacgaagggcttaccaagtgcaggggggacggagtaaatggtggccttgactacgcttttgggcgaattttggtttgattgcggttgcttttctattcgtgtttgtgagacttgcgagtagagtagaatagtagtagatgcagatgtatagtagtagtactagttgagatagatttggcacgggaccatgcttggatttggttgcggtggtgcggcggctgagcacacatgcacaccgttgagagcgagacatacatgttcgtttttatcggctaatctttgaaaagtgtattttgggtttggcctatctacacgagtcatcttaaagggattccttatcttaattaatccagggagatgctctactgttattgaacaaatgctgccactccactagctagcatcccacaaattgttgcttggccattcggcctacttttcaggttcttcctctctgaagcctataaacccaagccgtggacttcccagacctctcgattctcagccttgcttacggcccttttttccttgtcatgatctggtgtaggtgatttggtttatggttcaaccaaaagcgaagaattgtctcgttaaaccatacgctccagtgtgtcgctgaggtctagacacgtcggtatttatacaccatataatttacagttaattgcacagtgggccacttatgtttaccaaggttgcaacttggactagggagaagaaaatattttcactttgatttagataagtttgcaaaatgattcactttgtaccacttccctctccagctctctcatcactttcttctctacaatctaggaaacttggtgagctcgtgaaggcagcagcacgcggctcaaattcttaatgcatcagatcagcatgagcatgattcaactactaccaatacaggatctgctagctaggtgctcgcttcttgcgttgattatgggaactgggagcctgggagatccttgagcttcacgtcaggtagagggcacggcccggaggagatgctccttggcgatgagcagtaggcgctcgtcgtagcctccgcaaattggggacattccccggtgcagttcaccaaagcatcaactatgcttgctccaatgcttcacgatacgcagtgcatggcagaatgtgtaggtcgagcagagcgcgtacggcaccagcagaaatcgagctcgagcagcaatatatggacggcaacgtactagtggaggcatgcgttcttgaacattttgtgtgtgtatatccttctcatctccttcctccgttgagcctgctctcatctctgcttcctcgtcgaccacaagtagctggccgtgattagggaggagaggagaggaagaacactatttgatattgatgtgtgggccactggttaaaaatgcaaagttcagtaataaaacccggtcaaaagtgaaaagatctgctgatagctggtccaatttacaacttgggtaataaaacctgccctaaagtgcaattcactctataatttatcctcaagtgattacgttgctgactgtgatctctcaggtaaaaaaaaaaaggcccgaccaaaatccattcggagggcgtgaaatcgatagcaaattagcaagtactcgtactatacgtacttaataacgccttgcacgaaccgcatgcaccacacgtataaaccagctcgtcactttctcgggtaatatataatcgcgttccagaagacgtttgcgctcatcctgagccgtactatccattcatccactctcagctttggcacggatgcagtgcaccaaaagttatggaaaagagcaactttcaccgcacttaattagcacagtagaagcttcccgtttacactgatgcttagtcattagtcactcgagaaaggacccggtaaaacagaaagatctcaagacgtacgagcgcgactttgccggtgtcgatcggttttaatttggtcgctgatcgatcacgccgagatggcctctcgccgcgccatgacggagtgggacggagatggactgttcgttcgtctagagaaagagcacagggcgtagctactggtcggttgattgatcgcgcgatcgatggagaccgactcgagagaccgggccggcgcgcgagcgaggaggcaagcgaagcgcgcgcggatgcagccatcgatcggcgaccgcgcgcgcgcgcgtacgcgtcacgtcgcgctcgtggagaagctggcgctgctggcgatggcgctgtccgggtttcttgtgctcgcgccgcgcgggttcgtggaatcacggtgggattgcggcgtcacgagggaaaatatagtgaaaaacgcgcggttgattttgtcgcgggggggaactgtgcaagtgggtagaaagatcagaacggcgacaattctatcgtcttctggagggagaagtgtaaggatacgtccgtttctaacctgttcatggaagtggtcattgtcgagatggattgggattagtccatcctgcttaataataatgtaaaagaagctaacctacttgccattcagcaagcaaccaagtatcacacgcctcggatatattgctagtggtttcattagggtctatatgtttgattttattttttctgatctaaagcatttggctgcgtttgtccaactcacgtcgcaaaggaagctgacgagatagtggaagcgtcatcatcattgcacttaaactactcgtgtctggtttacttgtacactcacgatgaaaattaaggaaagataccgtcaggttcatcgttttcatctcatcgatatatatatatatatatgagatttcggcaatgctgtcgtacgtgtcgtgccgacgccacgcgtcgcagtcgcatctaattcacacagggctgattaacgattgaccaggtagcttcttgctgatcaaataccagaagcgacaggaagggcaacattatcttcttctgcttaatactcttagcttaaacgtcacgactcagcccgatcatctgtagcactatttctgctagtaattaacttttgctttctagtactattaaccatcatgatccgcgcccctttcgcggggtcaagcctgaaagctccacgtacgcgccgccaccgtgtgctagcttttttctctcccactcttccatatgcacctatatatccatttcccccttcacaagggcgccgtgaaaccgatgaatatacgaggacttgtcgtgccatcctgccaaatcgacgtccgccgcgggctcgcgccgcgcgcgggacggacgggacatcgcctcgcgcccgttcgccgcgttgcgcttgcgctttgctcgtgaaacggccgtgcggcagggtgggggcgcgcaggtgcaaagcggcccgtgggcggtgggctctctcgcatcggcaaaaaacgggtggcggctacgtcccttgtcccaggtggcccaactgaacggggagctagttttggacgagaaattgttcgagaggcttgggctcgcgataagatgggccgagacaccagtgctgcaagccggccacagccaggggccaatagcccactactgcggggaccgctaatgcgcgggtccacacccctctcccctatacgtctctctcctcccccttcctcctccccttatccaaattcatttgcacttaataaataccagcttctgccatagtggaacggaggcgcgtcgccatatatatacctcttgtaagccgccgtgcggcgttgtaacctcaccccagatatagtgaagatattttgctggctagcgtccgtggtttttctctcctactttgggagggttttccacgttaaaatctcgtgtcttctgtgattaatctattattctttatcttttgtttgcctatcatttcctaacaccttcttctcttccctactatagtacaccacaaaattattttgaaaaaacaaaagttagaaaaatttatgtaaagaaatattatatataaatatttgaatttaaatttaaatttgaatcaggtatgtaaacttttgacttataaactttggatctataaactttaggtgtataaactttagatgtatagaaatactatatattagaaaacatttgaattcaaattcaaaattaaatcagatataattcaaatttaaatttgaaacgggtatataaactttaggtttataaactttagatgtatagaaatactatatataaaaaatatttgaattcaaattcaaatttgaatcggatatataaacttttgacttataaatttttgctctctacactttagatgtgtaaacttgaggtgtataaactttatatgcataaatttactaaaatagaaaagtaatgtggtgaaaaaaaaagaaaccaggtgaagaaagatggaactgatcgcaaccagttggtcctgtcgatcgatcgcgaatcagcctttccgcactactactagcaatttgcagtttgatggcgctcggcaggcacacgcacaacaggaggactgaacaagtggtggctctctctacttctctagatgaaacgaaaagtttccagctcagtttgtagtgcccatcgtgtcgattggagttcctgccactgtgaagctttttattcgatcgcaactaggacgagtgtcaagctctgattgattgcagcaactaggagtataggacgagtgtcgatatttgattcgattgcaactaggaagtgccagtaacgtgccagcctctgaaccacacgaagctcagttgaatcagtcccaactccagtttcccatgacttggctctagatggttaccgaaaggtcgccagacaaaacttgattattacacactgatgctgtaagtacgtaccttgagagcaaaaaaaagttgcaactactcctgattcctgaaggatacgtaagtggtgacaacttgtgctcaaaccatgggtcaaatggatccaaaactgcttcgttaatagcacttggttgaagaaacatgcttatatactccatggtccccttcaataatggtaaaatgaggtccccacatcctcggatatgtatcaccatcgtcgataaagaattgaggctcaagatcatatgcctatgataatggcacattccatcaatcccgaaagcaaggagggcccctgttcattagtatgctacaaactgactgactagccaaataaatacaaattatcttttcagtcttaaaaatgtgcaatgggcaatgggacattgtagttgatctaagaacattttgataagagttatggatgtatgtactagtcattggttattggttagttcttacacaagtgatatggtataccctctaatattcaggaattcaagatttcaagtcccagtgccgacgtatactttcaacatcatcttctaaggaagaaaaaaagtatgacgagtactaatttaagtcaataatagcttccttagtcaatagagtagttgttaagtccgatgaagttatattgctggataatcaggtgacagtactagcagatcatgcaataatataatccaaagtgaaaaccattcgtatgtaccacctcatctcggttcttttaataacaacttccacatttagaacgtatataagggcataagaactgatcagcagcaaacagaacccaccatatcacaaccacgacttccctttcgagtaagcatactacctgcttatcatttatatgtcaggctcatttgaaaacatttcatttccttgatatagtttgttttaaattttgatgcatttcagttaatcttggaaagtatgcttttcttctatgttatgaaacacacaccgtcttgtggagtttgtgtgactacttgttttctgaaagaatatgctcagactggcatctagcagcatacatgtgttttctgactattttatgttcaaccatatgatacaaatgggaaaaggttcaaggctcaaatgataaaagctttaattactccatcctttgtattgtgagcatctctttaaatacgtagtgcattggatgcatagaatatactctacagataactctcaggaactagttattcttactgtctactctctccgtcctataatataagggattttaagattttgcttgcaacgtttgaccactcgtcttattcaaatttttttaaaattattatttattttatctgtgacttactttattatctacagtactttaagtgtgactttttgttttttatatttgcaaaaaaaatttaaataagacgagtggtcaaacgttgcaaataaaaactcaaaatcccttatattatgggacggagggagtaattatttgaatttgtgccgctcacagatttgaaccctcaaaagataattcaagccgtcagcaaatggggcaaacggtaaaatttggaagagttcctttcaaggttggcttctcacattcacagtcccgcccaaaggtgagcctttttgttcttttcaatgtcacgataaactcattcaaacagaaatacaattacagagacatcataatcaaaattcctggaatagttactgcttttaattagttcattggtcgatgataagagagatttaaagaaatataagcacgtaaggtagataatttactaatttaatgtaaatgattgatcatgcttcacagcaggaccgatggcaaggaaaatcgagcgagcaaagaagcatcgaatcatacaacaaaattccagaatttccaaattgtcacaagctagaggaaccagaggacaatcaacaaacagcactgcttctatctggatcccagaacctgtcttcccccgatatttttcagctgctatctgtggatgtatgtataccaacacaacttaattactctactatgcatttaacttttcaagaatcatttaacttaaagtacaggccatagtcatcctaactatttgtttgggatcattcatgctgatttagaccgattcagaaactgaataaatttttgacatatatttcatccattagatataatatacactccataataccagtgtactttaattaacagaacattatgcactaaagtactaatgatgtgcattatactgtacacatttcagtttgtatcatacctttaaaaatacatattgctgaaacatgtgcgtttcatttatttcaaaagtaactagctgggtggcctgcgcaattgcgcggctagcacccaaacaaaatcatatatttttcagtatgattttacttaagatttattaaatagctatacttgtatttctaattatatagtttttaaaagtcacaccagctgctaccctttacttctgtcatatccttcttttgtttcctcggtctaccactatttctattcattctccttgaaacctctaaaaattggatcttatagttttttgagtttattatctcgttgggtttcgtttttataatttctagaagtcccgtcaaacgctgccattatactcatctacgacccgtccattgtcttttctctttattgtcattgggattttacaaatcgaacataataatcgttcgggttcatttttttactttctataagtcccgccaaaccgtcagtggctttgccattgtactcctttatggttcgcccgctgcctcccttctttattgtcattgagattttaaaatgtatcatgattatcattgttttatttttactttttagaagttccgaaactttaaaaattggaccttgtagtttttagagtttattgtcttgttgggtttcattttttataatttttagaagtcccgtcaaacgatgccactatacacctctacagcccatcccccgcctattctttattttcattgggattctaaaatcgaatataactatcgttggaatttattttttattttctaaaagtcccgccaaccgtcggcggctctgcaactatactcctatacaccccgcgcacgctgcttctcctttttattctcattgagattttaaaaatcgaatgtgtttatcaatgttttttttttactttctagaagtcccggcaaccgtcttgcccgtccctccttttaatcatcattaggattctatttgatgttttactaacagtttttatatatcgtatcaactgccaccactattcctaattaaaatctttttttctttttctaatttatttttttaattaataccgtatagtgtttttttaatatttttattttttatcttttgaatttcagttgaactctcttttattttttattctgaattttaattaatctcatattggtttcttatatggattcttctttcactattgcttatttttaattccgaatttcagttgattttaagttgtattcctactttaacttttcttttctttttgctaatttcaatttttttatttttattccgaatattaactaatctcatattgggttcttatatgtactcttctctcaatattctttatttttaattccgaatttcagctatttttaaattgtattcttacttggactctccttttattttataatttcggattttattttatttttattttgaatttgtattaatctcgtattgggttgttatatggaaacttctttcaatatagcttatttttaattccgaatttcagctatttttagattgtatttctacttaaactctccttttctttttttctttttctccgattaatgtgggaatttctagccccccacagcgaacgtggtgtctccttttaaagctgttttaataataaaatagatatatcaaaatagcactattaatgcactatcacactaataataaaaagaaggaccgaacagagtctgactggaatagaattaattcattagatgtgatgtacatccttcatccatacgatctgtccatgggaaaagttgcacaaagtgagctatccatgtgggtttctgtagagtacaactgcatgcttcgggaatggtgcattcgatcagggcaaggatgcccaagggaaacatgaggagaacagcgtacacaatgtcaatcaagagatcaaacaaaccatggatggaatcagggtaaaacaaatacagtgcttacatgtagattatatgaatacagaattgatctaactggaaattctttccctactgcatgattttaatttcaagactctgctctccagtgaaaaggttcctcacacaacatatcagaaaatcaagactaggcacaaaacctgcgtaagaaaatggaatactctacaacattaaaccaagtttttcatgtgtagatgactgtggggggcgtggcagaattcttgaaaagtaaattagcaaacatggtacagaggggatgtggaaggaagagagaggacataagactccaaacagctcagatgcatgcagctctctcagttgcaagactagctacagcagttgcacgaatggttggtaattgccaatctgagtctaccaatgcaaacaacactatcatgactgccatagggaaagatgaacatagaaaaatgcatgttgcaattgcatctgccgcagcactggtggcagcctcatgctctgaggctgcaaagttaactggagctagcagagaacagatttcgacagtcattcacatgggcatggaaactaggtcgctaggggatttgctcatgctgactaccagcgcggcgacctgtaagaccaagaatagaaccagctcatatttctctatatattgtatactaagttacttgcatgaaacttggttcttttgctgcaggcttaaaaggagctaatgcctttaagatgcggaacagggcaataagcaattatgcctttgagaatctcatgagtaaccagaaagatgtccgacttcctattcgaacacctgatggtataatgcccaattaactcatcaatgacatgccacattcaattagattacttcattttccagggatacaagatgaatgcgaaaaaaaaaacactttcatttgtgtattcatgcagggaagatccatatcaggatggtttctgtgcactgcaagcatgacaagataatattgaacttaggaaaggagcatagtttgagaaccagtaaagaatgtgagcctcattttactatcctctttcttaagtgcaggaccattcaccataggcagtgcaaatctgaggtcttacctttgcttttaatatgtagctgtgctaaattgatttatccaattgtttaatcacccactttcttccagacataatttttgatgaacatggtgggacaacagacttcagctacccaacagatgaacatagctaccatgcaataaacctcgcaacatctggtggaaacatacagttattatttgaagaacatgaacaatacagcgcttggaagtcattcatcagatacctgataatcaacaagagatcaaggctatcctactgatacatgatgtacgaaaattcgacaatcagtagggactcatgctctacattccttacaaacccacacatttcttacgtgaacaataccaatgatcaacatcatgttatgggaagcaccatttgtgtggtggtggaacacatgactccatccacaaatatgattgtgtgtatccttagttggtgcagatcccggaagttatacttcctttgtccaaataaataaataataataatgtaatagaacttagtaatagttattccaccaaaatgcagtttattactaagatgtttggttgaatgatgagatccatcccctgaattatcatctcaacgtatttatgtatattttaagatcacagctagctggcaaaattcaactcagtaaacctgaactgagatgatcagacgggttccaaggccctacccctgccattctcacatattccattagcattaacatcacagcagtctttttacacatttgacaggacaattttggtgtgtttccaacttcagaactaaaaaaggcatgaattatttttgaaaggaagagtttctgtatttatttgaaacataagtatatttttgaaataagtatgtctgatttctatactttttagtggaagcaatagataaaacaattgcattcgctgtaaaccaccaacccatgagcaaaatcgtaagaaaaacaagcaattctacaagcagaataacatcacaagaccgacattaagaaggcaatagcacaaaaaaaaatcctacttacattttaatcaacgttgtaagctgaacttgcctaaacaaatataatgccgtgctccttaatggtgtcgatgacgatgccaagcttcccctcgatcctctcgttcttcttgggctcgtaggacatggcgaagacgtcggcgtccatggacctctcggcgatgaggcggccgatggtcctgcaggcgttgtcgtcgacgagggagggcagcgtggtcctgaggtccttggcgttggtgctggcgacggagatgaccttgctggtgcccctgtgcacgaccttggcgtggacgaagcgcttggagaagaagacgttgagcaggaacggccgcatgtacatgtccgtgcgctgcttccacgacttgcggttgggcctctcctccgcctccttccgcgaccgccgcgtccacgccgcgcgcaccaccagggacgcgcggttgctgggcacgggcggcggcgagagcgcgaggtgggcgatggaggcggaccacgagagcggcggcgacggccggagagagggcggaggtgcgcggcgcggggggagagtggcggcggtggggtacgcggcggcggcggccatgggagcgtgggggtttagacgaggtcgccttatcctgtacttacaccaattcttttaagagtaaatggcatatagggccacttctttttaccaatgtggtaagagtaaaagactaggaagtaggaacagccgagcagcccaacactttaaatttgaacccaaaaagattacatataagttttactttgggcaatttgcttcttccctatctttccctctcttccttgctctctgtcttcttgagcttgttgggttggtgtgaaagctcaaacagacagtaacatagagcctatggagtaccgccctccgtcgcactgctcgcatctcgtcaatttgctcctacaccacatagtccccaagctagagcagctctgcgcttgcgtcgattggaggcggccatctctacggtttatggtcgacgatgagcaggcctaggtccatccttcgttcattataggttaatagcattaggagggacatagcttgctcacgagctcattagtggtgatgagtgtggaagcgtaagcgtggatctggaagaagtgagtttcagtacgtttgaggacatggagaggagctcatcaagtggctaatgtatcaattagttccaatttgcaataaattgtaagtccatccggttcaaagtgaaaatatgagatgagatgagatctagttcattatacaactttggtaaagaaatcatgtccaaattacaattaactctttttttaattgcagaaaaagcatcataactatggcgaagcgatggcagttgagatattcaaatttgtcaagagtgtcagagtgacaacatgcagttttacaaattttcattaaaaaaatatagatcaaaggtacatgttatgaaatgcttttaccaaatttatcattatcctgccgcggattataatagcgtacattgtaaatgcagagtcatatgtgtagcgttatcccttatattaactgacgtaatgggtgcttttatcgtggagtattttacatccttataacaagtttaatagtatagcgaactattagctctaaatcatttatagtcaatctaatagcaggtacaatagcaagctataagccagctataaacatttttaaagagataaagaaagagagaaaagagcagcggactacagatctgtagccagctgcagcacagactccaagacgtaatatgtgtatgacagatgggaccaggtattaatagtatagtaagcaactattgtatgaattggctattacattgactatagatgatttggagctagtactgggctatactattaaacttgctctactatcattcatacaatagttacctataagcatataatacaccaatatatggtctcacccctcatacacataatgtattgaagtctgtgctgcagctgactataaatctgtagctcgctttccttctctctataagcatataatacaccaatatatggtctcacccctcatacacacacaatgtattgaagtctgtgctgcagttgactataaatctgtagctcgctttccttctctttctcttctctcctccagctagacacacaacatattgaagtctgtgctgcagctggctcttctcttctctcctccagctagagacacacaacgtattgaagtccgtgctgcagctggctataaatttgtagcccgctttccttctctctcttttcttctctcctcccgcttttcttctctccactctcttttcttctctcatccccgctttccttctctctcttttcttctctcctcccgctgttcttctctcctccatctagctataaatctttcttctctcctcccactattcttctatcctccactctccactctcttttcttctctcctccccgctttccttctctctcttttcttctctcctcccgctgttcttctctcctccatctggctataaatctttcttctctcctcccactattcttctctcctccagctggctataaatctaaatctttcttctctcctcccactattcttctctcctccagctggctataaatctgctgttcttctctcctccaattggctataaatctatagctctgtagcccgctcttcttcgcttttcttctctcttttcttctctcttctagaaatctgtagctcgctttacttcttctctctcttttctccacatgtgcttacaggtgacttgtagcctgttattgtactcgttcttactccacatgtgcgtgcttacagctaacttgtagcccgttattgtactcgctcttactgatacactccagttcaccccacccagttgcccacaatacaaaagaacaccgatgcacaaaatccataacacgactcaccaaaacattttatacagcgcgtagcatgcatgtacagatgtacctatatgtggtcttacctctcttggataccatggagtcaagacttcaggattacacaaacaaaataatttttcctccagtgaaattagaatatcgaatttcacgagggatttaaccgcgaatgtcatttctaaactcctgattttgatgaccaagtggggacaaccaccacgaaggtaaacatctgaaaaaaattcagtgccaaacaggcaactggtagccaaaaaggctggattgaacgggccaatgagcaacacacgagaaataatgatttgggtggtgccgagggccttcctcttttcccttctctgttggcatctgctaaacaaaatttccaagttacaaagtcttccctcaacataaatgagggaatacaattctacatctaaagagcctacgctaccaatatacatacatgtatagaaagtacccaatgcctccattagtgctaaccaaaccctccaagcttgtaaggtcattgtgaccacatcaagcaaatagcttcgctcccaccaatcgccatcaagcttgcatcaattctgtgtggcgagcgactcaatctgtgtatccttgggctcctaccgttgacaatctaatgtcctctttaaaagaaagggcatgacatccagagcaatatgttcatttgttctcatccgatgtctgtgaaatctgtaagaggatccaactcctcaatgccagaaaggacatcagagtcatactggtacggaacaaactctgtttcagcctcttgaggaagattatcaaagtaggtgaattcagaatcactgatgccaaggtcagatagggactgggtaatgtggaactctgctgagttatgcagaagttgccccggaatcctatgaaaattatttgtaaccggcacttcctgtggttcagtggtcctttgaattttggatttgggaggccttccagattctgatgatgctttgtgctttcctatggacttaggaccagatttatgccgaccggcatcgtatgtgtggaaagcagatgaggcccagtgagaaccttccccttcaaaacaagtttctgataccatcctgtgtaaatgaatgcaatgacacgttaggaagatcagaagcaaaaataaataaataaaaaatgcaaagcagaactgtatcatcatgaagaggatttttccggtgctaataaccactagctccaataaatacacaaaatatctgtgtcaacaattacctgaatctgttctcagcatgtctataagaaagtgtggacagtagtgagtgctccactggctccacagcatgttttaatggttccggttctagtatggacacgttaacaacagatggaaagtccgcctcataatcatctcgatctgtcaagaaatccaattccaattccaaaaagttacggcgggactcatgattgcttgttggaactaccattcttggacattgaacctgagcatctgcgagggctgtccttactagattaaagtttggtctgaagtttgtcatggaccagttctcgctgagtctgccaggtttctggagtgtgttagagtaactcataacacagtgggactcacaggcagacttcgatctccaaacagatgaaagaacagccatgaaatgtttctggagaagcaattcattgttaggaagctcgctgattacattgagcaacatctgagtttgatcctggaaaataagtcatagaaaatcaagttgtgcacacaataagttgaatataaatagtagatttgtttaaagcacacatatacaaaaaaaaacaggcacagtatagatatattcacatgcctggcctcttaactggattaaagcacaagattgcagattgcaactggcaattggcagaggtatgacttgcttattagtcagatagaggaccaaccccagcacgacaaccatttaacacttgtaatcactgtcaaagatattcaatgacttgagcttctaaaaacggccctccaggaattaagaatatggtattttactcaaaatccccttaatttagcgtttttatgtgtgtctagtctgtcggactttccgaatttgagtcatttcagacatattgatcatgtggcatgtttcgaatttgagtcatttcagacttattttagtgagtgagaaatgagaacagcgagaaccatggtaaaaatgtaaaatttgtaaaaatttaaggttgtcagcatattgagaactatcccactaactactcccttcgtccctaaataagtgtagttttagctagtcaaagacatattaaggggtcaaaagactactaagcccttcattaatatggagagaaagtgagtaggatgagggagtactattggttcgatgactaaaaatgagaagaaaaggatgtaggtggtattaaaaaggtctaatgctagtggaccactctaaaactacactcttttagggacgaattcttatgctaaaaactagacttatttagggatggagggagtagatgacatgagtaaactgacctcagatactttcaagatagccttcccagtcccagaaggaaccttctcactgtttgaattgtctgttgctgataagatgtgcttgcagactaattcccggaatctctcacagcaatgcacagggtgacggtatcttcctctataaaatgcaccacctggtacagaatgaagagaatcactagccagttcccaaagagggccgtactcatttacagttgcacaaagaacagcatcttcctcagttgtccacgagtctgaagcacaatcgcgagaccataggctcttcttcttcaatctctcaggcttgattaccatgacacgctttactggcatgcatgggacagaaattcggccatcactcttaattcttgcccccgatttgggatcagaatcattaagttcatctttcaacttaagctgcttgccttcaagaaaatgcttaggtgataaggcctcggaactgaaactcgatttaggggctttcttgagcttcttcaggcttctgctattgctgttctcttcctcattggttgacattatcctcttatgcttgttagaatgatggtgtgctgattcatcgctcattagctctggtgagggtgcattgtcatcaatgctcatagtatctactgatgtttcctcaaccataacctctgactcagatgataaacgtcctttcttcaaagatttgaacttcgctgccttcttcttgttcttttttgacttttttcgttgagtgctgtcaaagattgacaaaagttattcttttaggatacagtaaatagatgaaagcatatggacacatctaaaaccaattggaaagaaaatgcaggcataccatgtaaccctacagatgagcaccaaagtgaagtgcaaaacagcacaaaagctccctctgttttcatgactgtcaacattgactactactgtttctactttgacctttttttttttgcgaggaactattaatggtcaaaattattaaaatgattaatagtttaggattaaagtttcttgttgaagtttaggattaaagaattaatggtgaattgaactttcttgtttatgcttacgatacagtacactttaataacatgacatcttttcatttgtaaaattattgaaaaaagatgagtgatcacagtgtgaaaatgaatagtgcccgctgttagataataaaaaagcagagggagtatatgcatctacccactaaggccccattctaatgtgcttctagggggagctactccctcgtttatcatgagcacgcttcccgaactgctaaacggtgtgtttttgcaaaaactttctatatcaaagtttcttaaaaaacaaataaatctatttttaagtttatggtagttaatactcaattaatcataccctaatcatctgcatcattttgcgtggagctaataagctcaggttatccccactatcgaacagggcctaagagccaaaaacaatgaacaccaaagtgagagcacaatttctcagtctatacctattatcattcttttcctccaactcttttgctgcttcacgggcttgtctttcttgttcctcaaacaactgtgggtatcacatcaggtgacataattagccactagccccaagaggaaaacacaagaatagaagtatgaactgacctgtttttgagctagagcctcaacatgttgccgatatgctgtagtagcaaaatcaacatcccatgctgcagttaagatgatgtgtcaacacaacaaagcataatacaaggaagggtgagtatagcagagacaactacctaaaactaagttgcataaatcaaatatgagatgaaacttttttcgtaagtgctatgggctgttgggtcaacataaacataaaaacacttacactcataagaaagtggttcctggtcttcatcaatttctgcttctaaatcttctttgagtttttcaatgcgttcaagttcccattcttcctcttcaacattgacctgatagtttatagcagctttatcaattattggatcccagagttccaaaaaccgcatggcatatctatcaattggccggagctgattttcaaaagacgaacttgcttgacctgctgcagcagctgcagcagccatctgcttaacatcagcaagcatgtcaatatctccatctcctccagccaaagttatagccttttcttcatctaattgatttatagataaagcaacatgcttgtccttgaccaaatcagaacactgatatttatgctcttcattggtgtgttcatcaggtttagtgtcatcctcgtttacaagatcatcctcctcaagtcttccagcagcctcctcgctgaactcttgattgtccacggcctcttcctgctccagcctcttgagagccatatagtcagcttcatcttctgcctgtctaatagctgcttcaacatcaacatttgacagcgccagattagttccgtttgagggtccagcagacagagagcaatccttctgctgattctctgcatgaagtgatgagtgcccagaaaagaattccataggatcaagcttcttgaagaactctgtattgtagctaccgcgttgtatcactagatcatcaagagctcgcttctgattggctttcttgagtatattctcctctatagtgctctcactgatcagtctatagatgtgaacttcacgagtttgacctatcctgtggcatctgtcttgggcctgttggtccattgcaggattccagtcactatcatagaaaatgacagtgtctgcacctactaggttgattcccacaccaccactacgagtggataagataaaaagaaaaaactttgggttagtattaaacctctgcatcagtgtctgcctctcttctggctgggttgatccatctaaccgcaaatacgtatacccatatagattaatgaactcctccagtatatcaagcatcttagtcatctgagtaaatatcaaggccctgtgtccttctgacttcaaacgcctcaacaaaatagcaagttcctgcaactttccacagtcaaactggatcaaacgcctgtcaggaaagtacacttgacggcgaacaatcgcaggccttataggagagaaaacaggagaaaactcattcatgcatttctctctgtatgctggttcaataagaacaggagatttccctttgttgcaccagaataatggtgcaggcgctcgtgcagcaggaattgcaaaagtaaatgactcaataaaatcaagcattgtcttgaagcgatccaccgatgatagaacaagatttgctaggcttgatgaaaattccatgtggcataaagggttcttcttcttctcgagaatatcagacacaggatgctttatggtcaaaacctcccgaatatttgtgccataaacaggcctcttctggcatcttaccctattccaccatgcaatggaagctgctctttcattagcttcttttattctctcctcccacaaagaattgtgaatctcttcaaaaatatttgtcccattgcttctctgaccatcattagtagagcgagaaatgccagaacccctgagggttatgcttggagaaaaaatggcagcaacctcatcttcctcccaagaagtcatattatattcattttgagtaaatacaaaattcatatctgacaggtcaacctgagaaaatgggcctttatcaaggaccatgccaacagaagagctgatttgcatgttgatccctgccatgtcaaaagagctgataattggacggccttcaaaaagatctggatggttacaaacctttctaagctgcataatgatgctaatcatgccaaaataatttccacttgccaatgttgcctgtgtctctgagcttgcaatgaaatcttcatacaagttcctttgccttctggaaagtcggcaatatatgacatgctcatgcttctgtggcaactgtttctccacatcccgtttcaatcgacgaagtataaacggacgaaggacgttgtgcaaccgatctatcacttctttgtttaccttgtcttggccctctaccatgcctgaaattggattgcagaaccagtccttgaactcttgatgtgactgaaatacatgaggcatcaaaaagtgcatgagagaccaaagttccatgaggtcattttgtagaggagttccagttaaaagaatgcgtcgcttcgaattaaaatttagtaaagtctgccatctttgtgatttccagttctttatcaaatgagcctcatcaagaataagatacttccatttttttcgcttaaacactttggagtcctgaataacaagcctgtatgtagtgatgcatacatggaagtaatttggtttcatccaaccttgacgtttctgttttctctcttttgcacttccaaaatatgtcagtattttaaacgcaggacaccatttgagaaattcagtctcccaatttagcataacactagttggcactacaataagatgtggaccccatattcccttctcacatgcaaggtgtgctagcaaggagatggtcataattgtcttccccaaacccatttcatctgctagaattccattcagcctcttttcatacatagcaacaagccagtccagtccaatgtgctgatattctcgtagagaatgcttaagaaggaaagggaattttgtccgcacatttgttgttgagaacgtgttaccagtcggttgtgctgatcttgcagcagctgcagcatcagcaatcacatcactattatctccattggccatcgctttagtatcagttacatcaccctctttagcagtattttcctgtacaataggctctgatgtttctagttgtagaacactaccactgacatgctcaggtcccagcatgcctgcagattcatgatcttcaaatgtgtcattgttgccctccacaatctctgcagactggtcattattcacttttacggtctctgcagactgatctctggtcagtttcatggtatctgcagaaagatccctgtttacctccacggtgtctgcagactcatcatccacaggcatgttggcattgacatcctcaactgatagtgcaggtgaattttccaattctgttgtgtcatcatctgcatagccatcctaaacataaaaaaggcattacaaatggaccacagtaaagcataactgaagaaagaaatagaaattcagcagataccttttggtatcttgcaagaagttcttcaagtgggatctcactctctttctgcagtaacttaacctacagattaaaaaataataataccaatgatccagaactgtcacaagaaatatgtattgcacaagggtgcctctagtacaccatagtagtatgtcttttgtatcagtcctagtttagacaagaaaatagttttgcatcaatctaggccaaattaggttgtatacactcgaatattcaactggatactttgaatgtgttgccatcctagagcaagtttattgtatcacaaaaagtggtatagtttaaatcggaatccacaaaattactatctagttgttataccaagatatttcgtattaaaatattaaccttaagtagttgtgatagcacagataataaatcgattgtattttattgacaagtttattctactggcaacaaatcaggaactagagtggctaaacttcacagtgtgaaattttgaataataatgatgttcaatgcttatattcacctcatctagaggatcacagtcttctttcttcgccaactcttcctcttcagacaaagtagcttcatcatcctgtcaaaaaagatgagtttatagctgtataagaaaaaaccgcaaaaagagtgagatagactaaatcgatgcaaatgataactaatccatgaatggatgtttctagttttgaaggaccgccacacagtcataggatgcagaatatatgggaaatatgaaggcagtgggaaaaacagatgaagatgttcatggtacctttccttcatcattagcaacataatcttcgtcgtcctgaaaatggtaggtacataacagttgtctacattagagtgttaccacatgttgctcagataacaaataggaggggagaaaagcttttttacttggcagtcagaatccaaagaaaactataacaggaatcacaggaatttgtttgaaaattctaatccacgtcaactttaacaaacttcatttccctaaaaagctttgtacttgacaaaaattgccagtttggctaattcacccccatataactatatttccatccattttattgggtaatgtagtctcaagagaaatcaagtcataatgcaacgtccccccactctgcattttccttttctcttgaagctacaggagagactagagaagttaaaatattccatttaatacgggtagcaaggtccaatcctatttattaacttatttgcaaacattagttggagtatgcaacaaaactaagggatcggcagtaagttgccaataaaatcctttcttccccaccccaataccattcagaaaacttggtccaacaacaattgtctgttcgtactttccaatatttgaaagatttcattatcttgttactaggcagtggacagctggtagcggtgggcataaaaaccgaggacggaagaccggacccaaaaaaacgaacccaaaaagaccgaaagctcggtcattggtcactaattcgggtgtacaaccagaaagaccgaacttaattcggtgagttcggtcgttactttggattaaccgaaagaaccgatggaccgaagcagccaactacctccctgtatccctcctgtacaaggcccacaagtccacaagctcattcgcatgaacacatcagccacaaccttatccctttcgtccatcacgcaaaggcaaacccatctgcgccagccttctaaattcgcaacgccacccatgctaagcctccgagcccccggctgatcgttgcaacgccgcccgcgcctagcctccgcaccgctcgacgctcagctgctcgttgcaccgccgcccgcgcgcagcctctccgtggcccctgctgctcattgcaccatggccagcacccaaactccgcaccacccaggtcccgactgattgtcgcaccaccacctacagcctgcatccaccctacctccgcgccaccgcttgggcctagctctcccagagtccatgtaccttcggtcatttcggtggagaccaaggatcggaccgatagttcagttaactaaatcatcattaacgatttcttgttcactacttctgttttctatttgtaaaaaacgatcttcagaaaaactgaactacccagaccgaattttcggtctagacagaatgcccacccctaacagctagtctttctaagagatatgagtgaaatagaccaaatggtattggaacggagaagacaaaatccaaaacaaatacaatgataataaaaatgttcccctccaaaaataatgataacaaaaatgtacctttgcatcaacagatgagatattgccattgcatttcacctgaaaagtcaagaaagtttgatggcacgttcagagaacattcaaaagctcgaaatcctgagtcccctgtctttactatatactacataagcataagccaaatgacacaaagaaatcaagcatacagtgttctttttcacaaactcagagtaagactggtaatcatctgcttcctcagaagaaatgccttcatcacttgaagtatgatcagattcatcgttgcatccattagcctggttcaaaggatctggaagaaaccatacacaacacaaatcaaatgaaaggccacaatgtgtcaagtatttcagattccaaataccataaaggtgtctgaaactctgaatatataacctttaatcaaatcctttgaatctgagtcactaaaaacgtctctgccatctggactgctttccctgctaactgagaaagcttgaactgatcaaattatcaattgagagcaaagtggaacacagaattgattcctaaaatatgtgaaacatggcaaaagagaactgtttttcggagatcacctttatttttagtgtacaacttgagaatatcatccagtggtagatcagcttctgcctgcaaagcagccaattcctcgttgcgctcagcctccgtaatttgagcttcatcctcatcgattgtgtgttcatcatctttctacagcacaaacacacacaagagtaattcaatgtcctgagaaatgaaaaacaaaccaaaaaggaaaaggagaggtgtcattattatcttttttggacaggaaaatatgtattccttgccctggtacacaacttacaaaaaaagtaataatggttggtgccagtaccagtatctgtagaaatctaacaagttgtaatgctacccacgaaaaataaaaaaaagaatcaaaaaaatcacaatagtagcttactggctcttcacccaaggaactgttgtaatcatcatcgatttccacattgtctgtaaaagcatactgttaaaagctaaagaaaaaggacatttaaaatttcagagatatacagaacatttcataaagctacacaccaacatcagtcggacttgatgcatttatgttctcttgtgctagttcctgctgggatctttgattagtctgtaaagagtcattttcttgattttgaaggcgcacatcaacaagattttctgccagcattgttgaatatctagaaaaagtttgcacaaaacaacagagagtgagcatgcagcgatgaacttactaaaaagtaagatagttccaaaacaaaaccaactgataatagatggtagtacctttcagtctgtcctaagaggaaatcaagttgcttgtctagggccttttttttcctttcctcaagctccagttggttcttataaaaaacctgcatcaaacccaaatataaatagcataaggtttagtatattggaaaatgtggtgttctaaatatacactgagccacaatgaacttgccagcttctctattttggtccagaacttcttcacgtccttagaaatatttagggcaacttttctcaggcgaacttcttcctcctatgaaaatcgcagccaacattaagataaaacccatgaatactgatttgctatccacataatctacggtcattgagtatgtcgctcaatgtgctggttatatatttacttgcagttgaaagaacaaattaggggaaggaacactgcttggttctcaacttatcttcatcaaagttcaattcaatgtgctgttataaataatgtcttatgtactaatgaaatatatttcctagactgaccatagtttatgccaaaacatgcagtacttgtgaatttaacctattctaggctttatttgtcaacctgatcttattgatcaaagtctccaccaaatttaggtttagcaagcagttaagcaatcagttagctatggttcttcattctttattctcggcaggttaaagtcagatcatggtaataaataaagggtactcagttaaggtccctgtgtactgcagtgaggataaactaagatgcacatcactcagttcagcaaacggcaagcatgcagatgtggccatgtgggtcattgccagcaataaattacagtccagcttccttgtcgccttcccagcctccaacctttcccattactacagtttattattctatgtatataaatgataaagctgctgatagccttcaatatgggacagaattgtaataagacaactctcatggagtcatgttaatctgcctaattaataaaaaaaagacaagcaaaccttctgttttctctcgtcctttgttgcttggtcaactacacccttattagctctttgagcaatccttttagccatggacagcttccattttctctcagcatcaaactcctgcacaacatttaatattaaccaagccaagggaataggattagtatatcttcattataaaaccatgcaaattcactcagtgaaagaaggatcatgatctgtcaaatgtactaatagcaagtaacctttgccagccaagccatttctccaagaagatggtcccagtgagttttcgtccttcgaggctccccccttggggcttcaagagcctgcacaagataggacaaaacttttcagtcagtgcaatacaaagaaagtgaaaatggatttacatatatacaaaagaacatgacttaattttccttctctaactaggcctgacaaaatcaaaaacagtattatgcaagcgtggaatagaaagaaaaatgtgtgtgaagataagagaaatagtataacaatgatttgcagctactaaacataaataccaatgctaaaagctaaccttctggcgtctggctcttgtctcatgatctaactttgatcgaggaccttttgatgccatctttccgatattttgtagagaactatctcatgtcttggggcatattcagaaaaatcgtatacaaactgtaaaatacatttagtgcatgagataaaaggtctaaacttttttccaaaaaaaaaaagtattacagaaagaagagaaataaaacagtgaaactaggtcattaagtcatccgtgaatggtatgacatgttttgaactccctacgaattgtccaaaacatctattcacacgtttcaacgagtacccaaaaccaaccatgatcatcatagtcacaatgcaacattaataacccctaataaccaacagagctaattgacagtatctgagcttatacagcatgtgacaacatgaaattcctaacagtacatgttggagttacctgcaaaaacaatatgtagcagaaggcaaattgcacctcagagcaacactagtcaaatgcactgaactcatgttaagtcccatcactctttggtcaaactgattggtcgatcggagaaatgagcacaaaggcatcacataaacgctcagcctagccacattatcaccatcctaactgatacttatgccgcattaccttactcccaataaaagaataaaatatcaccaatcttatgcaccaaaacttcaaaacctgaataccgcaagctgaaaggcaggcgcccatgccatcgacgcaaacccctgcagaaatgctaaaccccacaaaagtgcagcccagacccaaagcacaagtaggagccctaaactacagcgacatagagtcgaatcgactcgatagtttcctcacctcggcacaaaccctctgaaccagagaggcacccaagcgtggccccggggttcaaatcagagaggggcccacccaccccaagcgccccaccggcggcgaccggcggtgcggcctcgcggcggcgaatggccccgtcagggccagccgtcggaggggatctcgggcgagggcctcgggcgccggcggagcaggtcgtcaccggcgagcggcgccggaggcggggcggcggcgagatcgggggagtctagggcacgggggttgcgggggttgggggactccttcccctccgcctcgacgcctcgggagctaaaactcgcgcggctgcgaatggacggaaacgcccctgggggttgcgaggtgcgggcggcgcgcgtggaggcagtctggggatttcgcgtgggctttagtggattcgggcgcttttgggattattttcgcagctgcggggtgtcacgcaggcttggctttgacgaggaggaggtttgttttatcgttttgccccgcttttgattgcgggacgagttcgctgagccggaggaaggatgcgaaatcggtccgccgctatcgacccaagttgttggggtcgtctccgtggggccctgttgcagtgagagaggtacgtcggtttttcaaggagtactccttacacaggatcgcagaaacctatcactatcactctctatcagttgtgcggttgtgccatcttttgggggctgtgttgtaaatggcctggagggaacaatatgggtagttttgatgggctttctaatgggctctcaattacccttctacccaattaaatttgccaagaccatcaaattggaatagctccactttaaccccctcaaatataggtctaatctaattcgtatatctcaaccgtaatgccggatcttgaccctccaagtattaaaaccggggtgaaatgtctctcggtggttttgagggtggttttcgttgacgtggttccggcaaagtcaacacatgggtcccacatgtcacatcccctccctcccaccctacccccctcccccttatctctccctctctctgcccccttcctcttccctcttcgtccctttctttcctagacagctcctctcgccttcttctccacagctgcgtgcacgggatcggggggctagaggcgagcactcttctcctcactctctctcctagcttcgggcacaatggaatcgaggacggcagtcagcggcttggacgacagagccaaggagaatggcgacggtgtggccgaagagaaggacatcacgtcactactagcctcgaggaggtcgacgctggcctcccgttttgtcatgtcatgcacatgtgtctttccctcgatcctgaaccctgactggacgtataggtatgtggtatgccaatgacagttattgaagctgccatcagttatgcatttatggattcgggtctagtgaatagggtatgcctaagcgcccacccgagattggactcgatggtgggtaagacccggagcgaggttgtccacgataggtcgcggcggtgacctcagtctcctcctcatggaggctcgcgacaacgggctctgatgctgcctgcttcttcccccctcttgtcatcgttgaacaccatagtccttaccatggatgaagacggtggcctcttcacccttgacccgctagtcggcgaggaagacccacccatccttgatctccttctcatcaaggctcgcggcggtgggctctaatgccgcccgcttcttcatccccaatctctttctccttccctcttctctccctcatccctcctctgtcaccccgtcgccccctacccgtcacatctcccacggcacgacgttcatcccctcatgcgcgcgacaccgcgcaacgaagattgtgtccgccttcacgatgcttctctccaccggtgcttacacagggacgtcggtgatggccactgcctcccaacccccttgagctactgcatcgtcgttgcgctgttgccgccagcctctgccctcccctttacctcccaccgccttgcctcccgtcgagagacatggggaccgcagctcccttgagctcctctgccatcgtcacactgttgccacccattgccttctcctcaacctcccatcgcctcgggcgccgcgttgcccactcctagagtcgcgccgaatccagaagataagggtagagaagagggggtggagaaggagagaagggatttggcatgtggggtccgcatagtaactcggcctgctagagtaggtcaacgagtcacgtcaacaaaaaaacaccctcaaaaccactaagggagtcatcttgcattggttttaatagttatgggtcaagatatctgatatagtagttaagagatacaaattagatcggaccttcaatcatcaaacccaactaatgaaggaaacggtccatttcgcatccctaatttgagtttgcatcactcaactataaaattaggtaagagtatcctctaacttttaaaatcactgcaaatcgagtccctcgactaatttgaaagtggtttttgacctatgtaacctctacttggcacgttggcatagtcttaatctaacatggcacttgtggtaatcacgaaactagaaaaaaatttaaaaaattttaaaaataaggagacccaatgtgagtcgtagttgtgccataatttttctaatgaaagatgtaggactcatatgtttcacatggaaaaaaaatataagagtaaatttcacaaagctataaatactttgattaaattatcataaaactacatatttaaagtgatgtatcacaaaactacagatctaacaataaatttatgacaaacctactggtttaaggctaagtataaaaaagatatagatttgctgatgaaattatcgtaaactacagattttggggtttaaatcctcagcactaatgctatgtttgagttatataagtccaacttctgttattaaattgatatcaaatctatagttttgtgatacttagtcttaaacatgtagttatgtgataaatttagtgctaaatctatagttttgtgatatatcatgttaaacctgcagtactgtgataatttactcaaaataaaaaaaacatctatacaattaccacttacatgtggatacgagtcctattatatattttttccttggctgtaattacatgtaagcattacgtcggataaggactaagttaatctgtcatgtagccgtaggatgaaagcgccgtgtaaactaccgagggacttgatttacattagttttgataatcggtaacgctctatagccggttttgcgctaatggacacgaatgaagctcaatgcatagccaagataattagggtgtgtttgcataggctggtttccaacccggaacagtaacacggaaaactgagcagtcaattagcacgtgattaattaagtatttgttttttttaaaaaatggattaatatgactttttaagcaacttttgtatagaaactttttgcaaaaaatacaccatttaatagtttgaaaagcgtgcgcgcagaaaacgagagagatgggttgggaaaaaggggtgctgaacacacccttaaagtgtactcttccacagaaataataaacttccaactcaaatttggcccagcaatccaaatatggtgagtgctaggcagccaaatagataactcgtctgctactgaaaaataacgatttcatggttttcggctacaagttggatgtgaatccacataccacatttacgcccccacaaacccaagtgggcgcacacaccttatttttctaccacttaactttatttcagctgttcaccgccttgctgctaacaaagggcctatttcgtacagttccaactcctaaatataactccaggagttgagtctagagtggagttgtgtagctgtctaaggccccgtttggtagggctccaaactccaactcctaactctaaactccaactccagtgagagctagctccggttgaagttgaaaactcgttaaaagtgtttggctatactttcagttctagatctgaaaaaaaaaatgaaaaaatgaaaaaaaacgaaaccaatcggccccagccgcgccgccggccgccggccacgcgcgccgcccgtcctcgtcccgcagcccccggccgccgcagcccttcgccgccgccggcctccgcccgcgcgtcgtcgtcacgccccgtcgccgtggccccctaccgccgacgctaccgtagcccgccgccgccggcctccacccgctcgtcatcgtcacgctgcgccgcctgtcgccgcctgtcgtcatcccgccgctgccgcagcccgccaccgccgccggcgcccgctcgggattgggaggggaggagagagaacgggaggaaaggaggattgtaggggtagttgagtggcattttcgtgtagatactctaaaaaattagagggtagtgggtcttttgggatagagtggagctgtggagcagcaaaaacccagctccaccccgtagttcattttttaggagtagctctgccaactccactccaaaaaaaggtggatctggatcgtttggcacaactccggctcctgataagttggagtgggagctagagctatgccaaacggggcctaaacccagctccacaactctagtacattttgtgagagagcttcacccaactccactctcaattttggtggagctgaaactgtttggctgaactccagctctaggaggggtggagttagagctggagctgtgccaaacaggcccaaagtaacagtgccaccgtgaaggaacagcagtgaattgtaaatagtagaaacaaaacagtactaggcagggaaaatgaagtattattagcactagtatgcgtatcaatcaacagtcggcaatgcacagaagcattgatcagtcactcttgcagaagaaaaaacatgagtggtcagtaacagtcgcgttctcttgttacattggccagaaaaatgtgaaacgatgaaacacaggcgtacatgatagaacaatactgcatctgtaggcgacctcttattctttagtatcgtgtcactatccccccgtgcatgtcctatcatcaacggagacttgtcgtgctaaaccaactcgtcccaatgcaactcatcccctcgaagagtctgcagtctccgtctcaagaaccacgacagcctgccatgcatctatcgagcgcgagcagacggccgattcatcctgacgcttacaccgttgccgccatctgcctgccggccacgccatcctcctcctccccgtcgctccggtcgacgtccaccgtgccactcctgtaccggctcgcgcacacgaggtacacggcgaagtccgcgacggccagcacggcgagcaggaagaagaacttgtcgaggtggccctcgttaaggtcggcggggatccagccggggcggccgcgcacggcggtggccttggtcaccgcgctcacgatgacgtcgctgaagtagttgccgagcgacatggacatcatgcagagcgcgctcccgaagctcttgagcgcgtcgggcatctccccgttgaagaactcgagctggccgacgtacatcatcacctccgacacgccgatcagcgcgtactgcggcacctgccacatgatgtgcaggtcgctgctcatcgccgtggtggcgccggccttcctgaagtgctcgaccgtgccggcggtggccatggccatcgcgccgagcaccaggccgaggcccatcctctgcagctcggttgggccggtgtggcggcccgtgagccgcgacacgagcgggcagacggcccggcggtacaggaagatggtggtggcgacggtgaggatgtcgaaggccgacatgctggagggcgggacggagaagcccgggaaccgggtggtgcggcgcatcgcggcgccctgcacgacgaacagcgacgccatctgcgtgaacacgaccgaatagaggatggtgcagagccagatggggaggagccgcaggatgctcttcacctcctccacctgcgtcaccgtgcacagcttccaggggtcacgcggttgggtgcacgtgccaagcttcgggttagcgcccaccaccgccgcacggtccaagaacctgcaatacatggcgagttcagtgcgtgcatgcgtgatcagttcacagctcacaaaaccacacaacactttacctgaaaccttccgtgtgcaggagcttcctcccaccggaatccgccttctcgtcgctctcgtagagtgtcacggcgcccggcgactcgccggccttccagttcctgcacgcggcgaacgcgacctggaagatcctgccaaccgggttgccgctggggcggatgtaccggtagcggagcgtgccgccgaggaacagcagcagcgcggtggccgcggcggcggtggagacccagaagccgagcgcccagttgccctcgtcctcgaggaagctgaggaaggtgttggagaagagcgagccgaggttgagcgccaggtagaagtagctgaagaaggagaccttggagtgcgactcggccgggtcctcgccgtcgaactggtcggcgccgaaggtggcgacgttgggctggtacccgccgttgccgaacgcgatcatgtacagcgcgatgtagaagatccccagctccgcgccggagtgcggctcgcagggcacgtgctccgtgccgcacccgaccggcctgatcaggtacagccgcgacgacagggacagcagcgcgaggccctgcaggcaaaacaccgtgacgcgaacgagtcagccgcgtgatccacatctcctgggcgtacgcgcaacgcgaccgcgatgtgccttgggccgatcgaccgaccggtcggcgccaccacgtactactctatgcctctactatatggaccatccactttcgacaccagcatacgtgcagatacaatccacccagtacagagtacaggccgaattaactccactctggacagattctcccgcaccaatcgctgttactttgtacgtacgttcctacgcatctatagaccatcatttcccgtgaaatgggcaatcagaacggaaaaaactggtcactgatgattgcccgaccaacagatcagaccgaagtagctagaaacatgagatcaatcgatcgcaccgagaaaggcgcgtggttttcagatagaactgcggagagagagggatgtgccgtgtggtggtgcttacaaggacaaagatggcctggaatatggcgcaggtcttgtagcggccccagtaggagtcgctgaggaaggcgccgatgagggagaacatgtaaaccgtgccggtccatttgctcacgttgttggcggcgtcgccgttgctctgctgcagcaccctcgtcaggaacaacaccaggttcacgtttaccccgaagaacgccagggttgccagaccctggttcactgcacaacacacacaaaataaaaaggtgtcaaggccttcaagaataattctaaacaaacataaaacgatgcacacatgcaaacagtgcgccgcttaactcccccatgaaagcagcaataaagccaaactgtggtagggcgatatcgtactccacataccctacagatcgatcgatcatttgatcgctatgcatggttgctacatcgtggataccatgtccgatgtctcctacggagatcctaatgtggcgctagtaatgcgtgcgcccgaatcccccgtggcgaggaaccctccagttgtgggcgttgcatggccgatgtcacctcgtcatgcagcattccgcgtaaagacccggcgcctaccgccactttaagcctcaacgtcgagtcacctcagaccgacttgcactgttgcgaaaacacttcactggaaagcccagtcatcgactttgtctccattttttgctggcccgtctcagccgggaaggagatggtgaaatcagcagagttcagcacaaagtacttacgaagaataaggccgccggcgagccatccgccggacttgcccttcaccgccggtgagcccttgatatccacggagccatcgagggtgtactcgcagcatacatccttcggggcgttactcgtctcatcgccttccacgacgatcaccctcatcttcatgtctccgtcgttgccagactgcaaccatcaagttacatgctgtcagttagtttccagtttcatgtgctgccatgtatacgcatggtgtttcatcactgaacatggagacaaaactgaatcttggctacagaccaacaagctacagaaacaagctgaaaccgtgtagctttgctaacatatatgccaagaacgatcaaatcatgagcacgtactaaccatttcttgctcctcctcgggctctcctcaccggtggcctccgtcggctaatgcaacgagaagctctgtgtgaggaagccgagcaggaggaagaagaggaggggatctatggaagtggttgtgtctgagcagagaggtctgggatttatagagctcagctgcagctggctagctggctctgcgactgtgagtaggatgtgcagatcacaaaagggaggtggaggagcgtgcgtgtcttgctcgcatgatgtcacaaacaggtattcttaggtatgtgcatcacaccgagacgtcgcgctcgacgatgactgtcgccgtttttccacctctctttttttttttttatcccgttctcatagcccggccatcgtagcacgcaagagcagccttttcccaagaaaaattcagatcgttcctggcaatctcaagtgtgccttttactcttatttgtggtcggttggtgtggctgctcgtgttctgtttcagtaacttatgtgactttacctggttagataattggcaaacgacgaaaaacttagtgccgagtccagcaatttgtctggttttaatcagggtttatctgcacaggaatactacatgacagcatatatagcccgccgcatctttttcactcgccagtctatttatgcagggtaattgcaagctgctagtcgaccctggaaatgggtgcacgccaaagatgcccctcacgctttctcttggaaatccagaaatggagtggcattctacattagactgctacgcttagtcgtggtcaaccaaccattccttcatataatcacatctgcttgagtaaatgaaggccgagactggaactctggattgtttgcccctgaatatgttgccacttgcctgtgtgaacacaaccgcacgatgattattctacgaggctgtacggaacacgagcctcgtctctactagtagctggctagtgcatcgtcacttcgtcaggtagaaatggcaaaaaagaccgaggccccaaaaaaaaactgaaccgaactaagatcagattattgtcatgttttttcactagccaaaattttaagttgaaggttgtaattgctataattaatgctatctcgatgaattgatacgttatatgatgtttgctactattatcttgtgatgtttaattgataagttaaacatgtcctcaaagaggggaaagtgatgccaaaaaaattgttctcatttccgctaattcttctgtctcttaaaaatagtcacatattctggtcataacctaaaatagtcacatgtaagaactggtattgatttaggttacatgcagcggcagcctactgaccttatgtattggatatccgtagattgaacgggaataaaaatataaactagatgacgtcattgatttgtggatatatatatatgtttaacgatttgtcttattaaaagatttacataatatatagtattatttattttgttgtaagttgttttaagcataatctgtatcttatctatttacacaaaattgtcaaataagataaatagttaaacatatatataaaatagttacagcgttacctacaacggagggagtacaatgcacgagcctagataggcttgcacaagtggcaggtgagtgttactactgtgttagtcccttagagatagggatagcatatttactgccatccatgagtttaagctgcgcggaatggatcgagctagctagcgcgagctatcgtcgctgcatgctccgccgctcggtgtcggaggttgcgtcgacaccagtggactggcgccagtggctgccaatgcgccaccagttgccacactcccttatctcgtgcatgcatttgtcattttcgcgggtttgcgcagcagcgatcgatcgatcgatcggaaagccgttgtttcgggctgccgcctgccgccggctggctctcgccggtttcagggaacagttaacagtgcgcggattgacgtccagggttcttcacagtggccgctgtgctttacagctcaacgtgggctctcttccactgatggcatgcagggtagtgtgacgatacatcatcggccggttgccatcgatcggatcatatatcacacgcacgcacgggcgtcatcacgccggttgaggggtgggcgtgtggtggcgcctagttcgctgtggtattactgtcgtcaagcgttgtcaaatctttgcttctgtttttctctagccactggtggttgcaacttgcaactagaggaggaggctaagagagatcccacatatctcggtcactgtatgtgtcgctatatatattgaactgaatcaatatgcatgccaaggtgtcattcctaaggtcatgtgcgatgtggtcgggacctatagagtttacggagagtgctacaaatcgaaagtctgatattttttaaaatatcggacggtgttgcagcgcatacggagaaatgtttcactgaccaataaaaattgtttcaagaggaatgtttcagtgccgcagagaaatgtgtcattgacaataaaaaattgttttaatataaatgtttcagttgtttgtattttggagagaaatgtttcatcagtcttgagaaaatattttatcaccgggttaaaaagttgtaactagatgcaacacttgaaaactactacctgcaacataaagacaacaatatgtgcaacatcgattaaaaacacaatgaaacatcattccacgacaagatgcaacaaaaagcaaataatgggacgactcgatcaggcggtgggtgaatgcaacagttgaaaactactgattgcaacaaaaagacaataatatatgcaacatccaataaaaatacaatgaaacatcatttcacgacaaaggtgcaacgaaaacaaataatgagacgactcgacgaggcggtgggcagcgatggagccgtcggcatggccggtgaagaggaagaagaggtgtggcgcggagagaggtacacaagcagggcagtgatcggcggctcgttgcacaccctaggctccagctcgagcagcgcgtccacggcgacagagaacacgaacacgcggccgcgggagtcgtcgacggcgaagtacttgatgagcccatccgcgtcctcgtagggcagcgtggtcgccgcggcggagtacacgccgtcccccgagccacgcggccgcgacgaacccctgcggtgccctccggtcaccgggatggcgagaagaaaatggggagaagaagataagacataagagataaggatggggaatggcgaatgggaaatggattggttgaatagttaaatgactgggtcccaccatacgcagccgtccggcattttgttttctatcgaacgtcaggaagcattttcgagagtctaccgtgtgccgaggtaaaatgcgaaagggctaatctgcaaattgccatagttttcttccttatttaaaatggttttacgtagaatgtttttatgggtgtgtttagatcggggtgtaaagttttggcgtgtcatatcggatatatggatacacatttaaaatatcaaacgtagactaataacgaaacaaattatatattctgtctgtaaactacgagacgaatttattaaacctaactaatctgtcattagcaaatgtttactgtagcaacatattatcaaatcatggcgtaattaggcttaaaaaattcatctcgcaaattagtcgcaaactgtgcaattatatattttttctatgtttaatactatttacatgtgtccaaacgttcgatgtgatatgttgtaaattttttccctgggaactaaacacaaccatatcaaaagtacctaggaaaatgtttcacagtggaccataaatatacacttggttcagtgtccagacacttcacacgaccgcgcacaagcatccggccattaggtctaccctgtaaattgtggtaaaacacgcaattgttacaaaacaacttctaaatctgatgcattgcaatcggtatagtcaaagtgagaaagaaaacactagtgaactatttcctccgtttcacaatgtaagtcattctagtattttccacattcattatggatgttaatgaatctagacatatatatctatctagattcattagcatcaatatgaatgtgaaaaatctatcttgatgctaatgaatctagatagatatatatgtctagatttattaacatctatatgaatgtggaaaatactagaatgacttacattgtgaaacggagtactaccccaggacgtttactcctacattgcatacggtcttacatcatgtaatattagaattgtttttctcatttcacatgaccaaaggccatcagcaatgtggatagacaataggacgtcagggcatataagagtttcatagatgctaattaaataagtatggtaaagaatggaaggctctgtttggtaaacctctaactctaaaatttagttttaggagttgtgttcagagtggagttctagagcagtcaaaacctagctccacatctctagttcattttgtgagagcactctacccagctccactcccattttaggtggagctgaaattgtttggctgagctccaggaaagatagagctggagctgtgtcaaacagggccgaaatggattataattctttgagaagatgttttctcctgtcgctcttatatgtcatctaaatagtaaaattatgatagattaatatgtgatatatcactttataaatatgtaagtttaaatttgatccccataagttgtaacaaaaataaccaatttaacttaaactagtacacacaagcatatctatttattttaacttatagaagtcaaatttaaacttgtatatttatggagtgatatattaatatatcttgccaaatataattatcttaattcttcaaaactatttatttgataagcacgatacgatggaacatccctctatgggttaaaagagtttcctgataaaacatgcaattgttggaacaaattggccgaacaatcatggcaagggctcccacccctcattggagagagcctaaggttggatataggagatagtcaaataggaggagaggagggatgagagttagagtaaccatatattcatgggatggattgggatcccccttgtctctggagggccctatctattcattgacaacggaaaattacattattgcccttgactcgttacatgagagtgacattgctctaggggtgttcaatcctctatctactaacttattaaataatagaaaaaaggctccacactttctctcacgataaagaaattctcatattaatcaagaataagaaaaaaagggagtccataataaagtacaatttaaaaatagctgaaatttgaaattaaaaataagtaatattggaagaggaaactagagtccacattggtattcaatttagaaccaagtgaaatttagaattaaaaataaaaaaagtaaaagtaaaggttagagtccatatagaaatacaatttagaaataacaaaatttcaaaatttttaaaaaatattggaaaacaagtctagatttcatatagaaatatagagtgtatttagttcacgtcaaaattggaagtttgattcaaattggaacaatgtgacggaaaagttggaagtgtgtgtgtgtaggaaagttttgatgtgatagaaaagttggaagtttgaagaaaaaagtttggaactaaactcggccataatttagaaataactaaaattaggaattaaaaaaataaggaatattgaaagatgaatttagagtccatataaaaaatacaatttagtaataacgaaaattcggaatttaaaaataaggaatattataagaagagtctaaagtctacataggaatttaaaataaatttggatctaaaataaaaatactaaaattgtagagtttaaagtccctatagaaatgtaatttagaaataactaaaatttaaaataaaaaaataaatattggaagaaggacctaaagtctatatatgaatataatttagaaataactaaaattcggaattaaaaataaaaaagtattaaaatatgagttcagggttcataaaaaatacaattagaaataataggaatttagaattaataaataaggaatattgaaagaggaatttagagtccatatataggagtactatttagaaataattgaaattcaaaatttaaaaataaaaaatattgaaacaagtgttaagtgtttagaatccatataaaaataaaatttataaataatgataatgcggaattaaaaaataaagaatagtggtgtcatggttatggatactacatacctaatagtagttgactaaatctcggcaggacccaccacataccatgtcctatacggaaaccgacttcagatatggagggagttccggataaggaaagacaaccagagttctacatggaaacgacaaggactactcggattgtatccatattggtttccctagttctacttggacaaggggacacctatgggtataaatacaagcccccctaggaggacagggggacagacactcaccatgagacgatcaacacgatcgacaaccaccatgagacgatcaacacgatcaccacgatagggacgaccacctcatcaacacccaacacaatcaacatacaagcctacatacgccaagacacgccgccggatatcgacttcagggataggcatggctattcccctacggtgtctccggataccgtcaggagatacgaaagcgctatctctgatctcgtcgggcacggattcgaggaggaagactaccttgttgtcgactacgagttagaccttcaaactgacatgtcaacaacagttagataggctacccacatattgtactggtgtgattatggtgaataagagcaataccggcttcggccaacaggatgtaaggttattacctaactactcaggggcccgaacctgtataaaaatccatgtctccatctctttacctcagtctcacatatatcctagcaccaacgatccccatactgtccaaataccgtagtcgtgacatcaaacgtcgacaagtggaagtagaggttagagtacatgtagtaatacaatttagaaataactaagatcaaaattgaaagtaattaataactatcacgtatgatcaatttagtaaataatttaaaactatgttgctattttaataataaaatgtgaaatatatatatatatatatatatatatatatatatatatatatatacacacacacacacacacacacacacacacacacacacacacactattatataagaaaaaaaagatacttttcgcgcaatttgcatgggccatcaatagtgtagttatgttattagttaacacgataagagcaggtacaatagtagactataagccaggtataaacatattttaatgagataaaggaagagagagaagagcagcgggctacagatttgtagccagctatagctaggtgtaggactaggtattaatagtatagtaagcaactattgtatgaattgcctattacattggttatagatgattcgtagctagaagttggctatcctattaaacttgctctaaccctaagagtggggtttatccctaacacagtggttaacactgaatgtggaacaatatatatacttaaaaaatcatgtcatcctcactagtcttgagccaacgcttggaaaacaatagtaatgattttcatttgtttcaaggtccaaacctggacctggtacagagtaaatttgacgcatgcaatgggtagactgtagtgtgagaaagaaaagaggtcttccgccctcgcattgcacatgacctaatcggttctactgtacactcgtaacagtagatgcaagatgtgctagctggtgctcgattcggactactggtaactaatgtcatgcgatcattgtccaaggccagtcctaacttaggtctgtgcctgagaagtaagaattgatcacatccacggttgcagggttcggtgagatgaccaatcgatcgatcattgtagatgggactaattatcgctgctgataatgactctcaggcagctgatgggcgccgttcgcgtggtgattaacctgacggcacgccgctgtgcggggtgaggcaatgaactcgtgtaccttcatgctgataataacattttcctgacagtcctgctctcaaaatatcattgcatgctgcttaattcagattgcccgtctttgaccgttaaactaaatgcaaaaaacatggagagatatcacattggacatgctgtcaatcagatgggcgccatacgtttggactctgtattttctagtgtcctggttcactggttctggaatgaatacaattacacaaaccgtcctttgtaatgatatttcgagaaaaataaacctccgctaattatttccccccagaaagctacatatatatgtcttcaggctgaatcaggcagacgcctctgacgaattccacgtacgtcctgatagatcgatactactaacatctgagctgagatagctatggtccaagctttgcagcgcattggcagtacggcagatcgattaaacccagcgaccgtttggaatcctaaagggcatgcatggtcgacggctcaagataaccaaaggttactagctgaacaatcctacccgtcactgcctttatcacgcttaaaaaaatataaaaaccaaaacgtgcctgttcttatagctatactatgaacgatcaaccaatgcaacgtaagtgcacgcacgctagcttactgctactaaccacatgcatgctgcatgcatgccagaatcactatattcactgccgtgccgatgataatacatcaactaacccttcgtgacatgtggttaggccaaaagagacaacccctgatccaatcgatcctccctctccgaaaccgtgcgcgaaacgacacgcgcgcatacatgcacagcaacgcgcggctcgcgagcactggcccgcgcgcggcccacgtacgtcgacagccgaatcccacgcgatctcccggccaggacggtcgcgcgcgcggggaggctaggcttcgggcttcctttttccggttttcccccgcttttctcgcggccgtataagcggaggagaatatcaacgcgcacgtaggtgtacgcccgtactactacgcctctctctctctctcctgtggttggcatatcgctcgcgcgcacgcgtgggctttggctgccatgcatccgccctgtcacgctccactcaacccccccgatcggctatcgcaagggctgggcctacccgatcgtgaccgttccgaggggcacatcgccgtcgaccatccaatgcccacgaccggggcggtcacgcatccatccatccacccccttgtgcagcagcacgacagctactactttggtaggggtcctagctatagctactgctccctgggacgtggtacgcgcttctgctcatggacggatccgcgacgactgtgatgctgccatgctcgcacgctgcgcgctaaagccgcgggccacgcgagaccgcgagagacacgaagaagttgggccaactgttttcaggtttcctggtcacgacccccatgtgtgaccagatcgcgcgcatgcagcatgcacacactccgccggctcggcgagcgtacagagctggctgttcccctgttcctgttggtgcaggcgaatcgattagttggttcgacttccgcgcatatgtgttcattgcacgcgcgggcaatgggcgatggagggactagggagccgcaattcgggagcagggtgtactgtactcgcggtgtacaatggtggcgagcagcgagatcgatctatcggcgcatcccctttctggtcctgcacgggtagacgctcgcatagttcaagcgatcctgacctaccgtttcctctgcacaggtcgtccctttaggctagctaccttttagcagagtttagtgtgtgacagtgtgttccctgtcatatggccgagcttttcttgtgtgtgtgtgtggggggggggggggggggtttacagttgaatgtacccaaatgttcttgtcggtaagccagatatgatgatcgggggaatataggccatccatacgacgacatattgtcaggtgtgtgtatattgtgagtcgttatcacttttgtctgcactgtactagtgatttactcctacgtgtctgcagcgctacatgagctgcattttgcatgactaccatgaaagtgtgtcgacaggtccatatactgtgtatccagattaaaacgtagtagtacgagtgactatgatatttgctaaagaaagcaattgcattgtgctttccaatgcatttgcgcacttttttccttttaagaaaaatgcagaaatgttatctctctctttttttttgtctttttaaaaagacatagatgcgtgcactaggagggctggacgtagaagccttaccaggcatacgtccaggactctaggcgtgcaaatttttcaggtaagctaatccaatcaatctttcctgtgcgttgcgaccagatgagtagcaagcagtgggtgaataaaattgctcgacagtgattacagatcggtttaactaatggggattaggactttccaatcattgctttccttccgatttccctttcgttgatgaactgcaatcactgcacgcctccatattttagcataaaggcatgcgtgacacgcagctacgtttttcaggtaaccaagctcacgctggttaagtgcattctagatggatcgcctgacagcggctgcagcctactttataattcgaaacgacgactgatttatttcaaatcgactttcgctttaccatactttcgtgattaatgaaataaacaacgctaaaaaaatcttctagacctactccagtctgtcactgaaactaaccatagaattcgccttcgatcttctaattatcatcagctacacggctagctcagctaggcatacctgattcttgatgtaaacggtatgacaccgacatacctaattcttctcatactcccgccactttacgtggttggctatattacagagtttacctctcggtctcattctcatatatgctctgaaaaaccaacgtgacgttcctatcattgcatttgcagagggcctcctttagcaggacgtcgcgctccgattgcgcccccactagcgcagctagctaccctctcgatccccgtcgcctttgtccaccacgcgttcgcgcggggatgacgacgaagagtcgacgacggcgaaacgactgcaggggactgtgtggcagctccccgagctgtcgctgcagcgagtccgacgaagaagagatgcgatgctacgaagccaccgaattttcagccagcacggccgtgaactgaccaccgctgctgtccggcgggcagcttgcttgctggctgagaaatgcacgtcttgaaggttgcagccggggctaaagtgccacactggcatgcataaacctctgaaattctgatggctacagccaactaacactgcctccccggcctatggccatgatctttggatgaagcctggctttagtggcttccatgcgatgcagagagagtgagataagccttctcgagataagtagggagttgagagtgactcatgtatatgtgctgtggtaggtctgcttgctactttatttttctccccctgatctaattaatggcttcctcctgtgcccggaaaatgacatggtcgtttgttgttatgtatactgagcatgagcagtgaacatctgaaggattttgacggttaaaaatgcgttcatgcgtcgtggagaaacaactgtagcagctcgttttttccccccaccacttgtctcgaattcactgtaccttgccaccaattcaactttgatttggggtcatgtagaattgaacaacttgagataagtcaacagtggtgactacctggaagcaaattccttggtctgaaatgtcccggggggagagaaacagaatccagtaatatcgtggccaaattttaaggttaggtgtgttccctgcctcttcctgatagcctttttcgattatcagaattcagaaaatgatcgaattggggtagataaacagagctacaattaaactggggcagtgaactgtccaagtttgttacctcgaatcaattttcaacgattaaataccatgattgcttttgacaaaacatgctactagaataaaaatggggcttttgatttgagtgtgtggggactatagaaaatagtgcatgatctgaagactttcagtatcgtgggtgcacaagctccacaaaaaaccttttggataggtcgtacagtgtatgacctaaaaattatctggttcactcctcaacaaaacgtggtctgaagcaacttgccaactcgccccttcagattagtcatgattgtgcagtgtcaactgttgatcacttgttctcgtgcccataaagaaaaaaaatgttgttcatggtcctatgctgtttagtggaccatatcccgaatgtttttcatttcacattttctatgcagagcatatactagtattagaataggctgaatagctatcgtaaggaaatagatgtgaaaatgatacagaaatatcatatggtgattctgtaaatggtattgtcctgtagacactccatgtctccatggcagcggagtacacaaacataaaagcaacggtagtacattacaagtaacaggtgaataaaatgagcatgtaaattagaaaaaaaaatccattttactcgcccaaactaattcaatagaccatttatcctctcaactattttttggctcattttatatatcccctaaactattaaaaatgattcattttactccttaataacatttttttactcattatacaagctgtattttaagctgatattgttagagccatagatgacaccattaccaaagtttaaaaatattttaaaatttttcatggtgtttgctcgaactttagaattttgatgtttaaatcagtttgaagtgctttcaacctatgtaaacagtgagggaaaaaaatcacaaaagaatgttgacgtaaaatatgacttatacagggagaactaaagaagagaggtagcgttggttgggggggatgtgaagtgaaccattttcaatagtgcggggtgtaaaatgagaaaaaaaagtttaaaggggctaagtgctccaatgaaatagttcagggagtaaaatgaactttttttgtaaattaataaggaagaaggaaaaaaagtccttacgaggctaacatagttgaagtaacaacgatttattgttacccaatcagattgtttgtaggtggtggagatgatgcaagatgggggtttttcggcaacaacggttgtggtaattttctatgaatgccagatttttgatgtatgattttgttaaagtctctgtcgagtgttgtaatagggaagccaattgtgtagcacatgttctaggtaatcatgcttttaagtttaagaattcttgtaattgggttgatgaggccccaattttcttgtggaacattccagtgaacgatgtaactatgtttgtagattaataaagcacgctaaatgactttcctaaaaaaacatagttgattgtaatatgttgtattacagtgcaacacactcaagtcatttgtgcgtcagagtgagccgtgtacgtagcgaaaagtgagattgactcgtggcgccgtcctggttgtggtcgtggccagcgcgttggcgcaggtgtgcaacaagtacacgcacatccggggctccgggccatgcgacgcgtaatgattgaagagggcgctgccaagacgccccctgcatctagcttcgccagcctcacccgcttccacttccacgactgttttgtccaggtgagctagctacactaagccatgcctccacacaacggcacggcacgccgagtaggatggtctgacgagcttgggaaagataagtgggggataagagaggaggaagaagaggaggagctgataagtgggtcccacagttttttttaaaaccttagtcatttacatgtggtcccacttcaatttataactaggttgtcacatcaacataggtagatcaagtcaacatgccacgttagcgaaaccaccctaaaaaatatcaagggaatcaaattgtactggttttattattttttttcgtgggggggtcaacatatgcaatattgcgtttgagggatataaatcagattggccctacaattgaggtagttaaattggacttatttcttaagtcatccctagtgatccttacagaaaaagtcttccctagtgactagttagccaattacggagaaattcaccctgtacactgaaatctgcagaaggaacttctatgacatttcaaagtttgagcccggaagcctgcaccagtgtctacagaatatcttggcccaatggaagtggcccatgtgaagagtttcgtttaaggccatgtttgttttagcttaagattattgtaatctaaattattaaatcagattactctaaactggattataataagctgacataaaataagctgtgagttgtttgtttctatagattattacatgcatgtaagggtaatgagtctttagtcacttaataatctggaaaaagctcctccaaaggagattattagattataataatctggcttatagattataataatctatcaaaataatttacttgtttgtttcaatctacttataataatccagattataataatgctaagctgaatcaatcagggcctaagttaaagccaacacataaattaaagagtggatatgccactaagtttgtcacatgtttatgatttatcatttagtcatattctacaatacgctatcggcttttgtttaacttcgacaattcaacatcatcgtctgatgagcctccattactaatgtacaattttatccaaattaccaaaacacccctaagacaaaaagttacaaaatttggatacaaattctgaaatatcaaattttaagtttttgaccaaattttggatgtttataatcttatgtttataatatgatatcttggaatttttgtccaaagtataaagtcaatagcaaatcgcatgtgtctataatgggttctctcttggaagcatttcttcctttttcttccccaaatgaccacatacgttcccccacggtttgtgccccttaattcgtagtaatttcaatagatttacattgaaagcacaccttttcaaatatttatattttgggttatcccttttatgaaaagaaataattaaattgtaagtgagatgtggaagagtcacatccgtaccttagagctaagccatgcctgtgttaaaccatttataaactaaagtttttttaataaaaagtgtgcatcaccataagcatgagcggaacatgagcctttcgtgaaagcaacaggcaacaggcaacagggcaacatggctaatgtcataatgtttgtctgaatcatctaccattttgacttggaaatggagttttggctggttgagcccagggtggatttagacagtgctttagcttggctatggtcgtgtagtaataaaatctatctttacagaaaaaaaaacacgatacaaaatgcttatgctcatatgtacaatttaaatgcacacttacacacatacacacacgacctatttctacgagtgccccctcccttgctctgctggaagccacctcccctacccatcggaggccaccggcggggtgtctagggtcggatctacccgtggggtaacggatccgcacgtaggggtgatagtttcgatcatgacgactggatctggcctgtacaattaccggtcacccaaccacctcgtgtcgtggccgttgaccgatcattgcaccgccatagcagcctcgctcactttgccttgctctacgccatccattgctcgcggcttgctgctatgccgaccgcatctcctatgcgagaaaacgacgctaccatcatggctcgccgtgcggttggtcggtggctcactctgacggcggtgaggtgaaggtggggggctgggggaggtactttggtggctagggtttccaccccgagccgcccgcctggcgggacgacgtgggggttagactcactctatatcatattatcatattataagctgttttaattttttttctcagtcaactttgtttttttaggtttgatcaaatttattaaaacttaataataattataacattaaatcagcttcattaaatctaacattaaatatctttatatattatgtttgttttgtattgaaaataatgtcattttttaaaatttaatcaaatttaaaagtttaaccaagaaaaaaaaaatcaaagtcacttataatatgagaaacggagagagtattccgtttatcctcgaataattgttatcatctcagtatcattacatatattatctactcctatcaatacctattggtaacacaccggccaaaaatcattcacctcgatggaaatctgagaggcccattggatacttaataagctaaactaaaaaccaaaatttgaattttcagacataattttaagttgatcttaaaatatattaacttggtttttttatattagcttttaaatcactaagaaaagatataaattaatttttattttataataaatcattttagttttattagaaaatatgggtaacgagggcctcaacaagaaacaatcaaacactcgtacataccatgtggacttgagaaaaatagtttagaaagtcattccgacaagctaccgttattatttcttcccgtcacaatccaagtagccttcctcctcttcttcctcctctcgcgacggcaacaaacgattcacttccccattatttttccttacgctctccgcctctccgccaaacacgcccaaaatcgtcctgctcctcctccgctccatctactggatccgcgcgaccggcgatctcccccgaacctcgactgatctactggtgacgaaccctaataactcgcttgaatatattgttcggagtttttcttttcctggtcttcttgagcagtagtataatcgatactctgtagcatccatcttcgtgcggatcttgtatgctaaagttctcgagtagtactagcagtttattcatcagaatcatcaggggttgaactgaatccccatgctgtaacgttaggtccgcctcttgtttggtgaatcaattcatacctcgattctttcagggtgtgaatctcatgtactagtattgactagctgtagaaggctattcatagtcatagctttactgttggtctaagtttggtcaacgggtactattcttaggctttcctaccgctgtttctgcgaatggttagcgttgaaacgcagaattgtacaatctttttttgcgaataggttatcaaaccaagttttgatcatttgctggcatctataaagctaaactgacttccttacattggaggttggtggaagagccagcccctaccttcgttagagttccttcaaggagctaactctaatgaggctagaggttgtttcttgtaaggtgataggttggtactagtaaaatatagaatcctttgttcattcttgtccttccatcacagtcgtttctacagtttggaccgctttccaggtaagttcttttactaatgtccagtgttaagaaggtggtttgtttgacggacctcaaatcctcaataaaggaacatttgattctgaatatatagcttagacagagatttgctcagtaaagctaatatcagttgtcaaggcgtattaatttaattttgtgcttactgctaaaataatcagcacaactaatgcatatttagatgttttcaccattctcgcttctacagtccttttcagtggtagaggtgaaatgaaatatagagctagaaagtttcatgtgttcattcttcaacagcagtttaaaaagctttgttgtgttgcctacgtattcttgcatcataatgcagagtttctgtatgttctccttaacacagtacaaaaacaaagcattttctccttggtacagtaatgtgcaaagcttttatgtgttttcaaaaagcggcgcaagaacgaaccatgcctgggcgatgcatgcatgactacagtttgggctattgtggcaggctcagttctctcaaaacttgatttctaaaggaatctttgttattcccgaaacctatatttacctcaattgaccatagatggcaacaaaagttggagcaactgggtcatatatgtatgaaataaaatcagaaggtcaaattctatcaagtcatatgcatgatctcactgagaatctgacaactacctgtgggtcttcttaagttctatttacgcgatcagtcactatgtatgaattccattatctaaaaaaagacacaatgtatgaatatgatgccttgggactgatctcttggttgttggtgctgtattaagtaaatgcgtactgataatttcatcaaagacttaaaatgtttgataaaggtgcactgtgcatcttcattctttgatctgccaaatcagcaattgatgtgttagcttggcactagagctctgggagaatcactagtcaaaacttgctcgtgtttcttggttatctcattcattactatgttcagtacatattatctatttccttactgttgatgtttcaagtcttgagagttaggatgaccccgagacaaagatcaagagttctgacatccttccttttttacatcaaatgtagcctttgaccgatggcatcgcctgcagcgccaacagcaacggagttcactcaggaagctgctcgtcagtctctcattgagatctctcagtccctcccggagaaaccttcagcccagaacctggaggtgaagtcaccgagcccacgtgcagcaaacgaagatcatgaagatggagcagagaaatacagatcaaagctgatctcaatctcctacctttctccggatgcccaaccgacgccgtgccctcccaagaatgtcctcacttaactgtgacgatgctcctactcgtgcgtgtgtggcacagtatatcagtgttatacctcacttttagctggaaagatggaaatggaatacttttgggtgcttatgtttctaaccctaagaaacattcagggggaaaaaaaagaacagatagttgtacagatgactttgtgacgaagaactatttaccaggaacaggcttgcttaatccttgcatgttattttgttgttgcataagcttagttgtttccttataatgtatggttattcgaagtgctacattttgccctctttcagagtgaaaataaaaatctcttgcggttatgaacgacctgctatgaaacgaacactggcacgcagtccaattgctaaccttgttggtctcttccatgcgccattcttggtcattggaagagtatcaagcacaacgactaacctcttgccttatccatctactagtattctttctgatttagttcaactttgttcagaaatacagaacgtctgaacaatttttgtttcgagatttgtaaacttttctgaagaaaagggaggcgaaggctcggttaattcaaaggcccaactcataagaagcccaaccagcccatcaaacggtggggaagtgaagtccaacctcctggcgatccaaggcccaaccgatcatgcattcacgccactcacggtgaaccggcggccggccgatcggcggaggatggcggccgcggcgggggactcgtcggagccgaaggcgagcatcggcgcgggcagctgctggtcgccaccatccacctcggtctcggaatcggtagcatctctccgcacctctcctttcgcgcatttttgcatttgaattcggttccatccgcattgttgggggggggggggggggggggcttcccgtcggtgatcgtgctgagggaactgtagcctgtaggtccgattggctccgggagtcgtcgtcttccttgaagggagattctaccgtgtggcttacttggagtagaagagtgtctccttgagtccttttgtaccgagaggattcgtagtctacaggggaattagggcgaagtgctgtcgcttatggctgctgaatgctgaggcagagttagcgcgtgagtgcgcaggtgtactgggacaactaccccagtttgcgcgattgctctgaaaaataacgatgtagctatgcgattggctgcatagtgcatagctcggtctaaaagtgtgaagtgtgaaagaaggggaaaacccccatgaacaatacacttgttaaatcaattttcttctttaggatttcgttcttctgtttttgctttatcctttgatttagaattttatgtttgggaggttactgaattgataaatcgtaggtttattatggagtttttcttcctcaaggaaaagaaaaactaaaagaggtttggttttcacgagctagagaaatgcccaggggtcttctggctagctccacaaggtggtgggctagacgacctgggtttgaagcctcatcccttctaattatttgatattaggtacttccctaatattcacgttttttttttcacaagccagagcttgtactcagtagtatatacgaagatatatgcttggactccgtgttgaattattccatatatctactttcacttctgaattcatatatgcatccaagcagatatagaatggagtgaattctatacacaccaaatatatttgaatttgtagtgagtgaattctattcataccaaatatatttaatgttaactgaaaatttaattgtgtttgatgtatgcagacatcactttagatgtagagttcttgtgcagagaaatgctacaatttgatttcacagaaaactctgtccccgcttttctattggttattgctataagattccatgttttgcattgtgcatgcagtttttccaatgtcctttttgtactttttgtttgtcaaacttctagtagctcttgccatttttaaatttgaaatgtggtttcattttctttggaaagtttgggcataaatttccaagaaaatatttatcctttcccatcctactctgatggttgttagatggtttcaggtgaatgatgcatataaatactaaacaaacatatgtcttctacggccaaatttctgcaaatgccttctctaattgatctcctggttaatctttagttactaaccatgaatattgcatacagcttccatattcttgtcctttaatttgcaactttcctgcatttgacatcatagtagcagaccaagttttgttctgattccattacttaaatcaaagacttggccacggccaaggtagtatttccaatttctaaaacctctttgttatgtttaatctcagttctacattcattattattgtgcatattttcagagtcatattttgtagccatctgcctgattattgcatgcaaaacacattagtatttgttggaagatattttgcaaccgtaattgacatactggaagaagtcataaccattattgtttccatcgctgtataggttttattttcgcccacccatttgccttccactgtttagggaaaagaagagccttgatctcgccatgttgcatttgctttccttcatccagtggttatctgcatgaagtaacttcgatgcttacaggtgattatgcgtgtgttcctttttcctctattagttgccttggtttttgatattatcagttctgtgatatcgttttcctgcaacttggggcttagggcaggtaggataagactcagaaagcaagtattggcagtgactgaaaggtgtcctttactcttccagagttacatttgttcttaagaaatgaactttctaattgcttgtgtcttatactaaaaagatacttgtctagtttgcatttaggtttttcgtggtacatcatgttgaattccaacaagtgcgtattatattatatgcagaacgagcacttcgtgattgttcgtatggaagctatgttaacacatcaacctgcaattgcgtgcaacagtggtggtcatggaagttgtaaatgcattaatggggtttctctatgaggcctcctggttaaatccttgaaagaatgtctggtaaatgatcataatataacaattttgatgggaggaaataagaacagagcattgtggtgcaggaacaattgctagctcctcagctgctttattcttaacctttaccatcagatggtttgatagcatataatttgacttatcacatacagtatgaaagaattttccaggctagacatcaatttcctgaagttctagacatagctagagagtcagcaacaacaacaatcattacaattcagtcagttcagctattgtgagtaaaccaaattgcatggtacttatgggtctgtccatctttcgtactactaggttgtgtctaatccaggattaggttgctatattttgggatagagggagttcgcattaaatctggacttctagattatgaagttccggacgtaacacttatcaactggaatgattaaaatacctagagaactcacttattaatctctatctatcttctgttattctgccatgctgttaggacttaggatggaccaatatcatctgctattcctgcacctgagctagaatgtcttagaaatgaatatgatactagcttgagttttttttaaaaaaactgtttggtttccttcgtgtcctatctttgttattatgggcatgaatccataacatttcttgagtggctatttctaagtggagttctcttgccgccaatctttttccaatggaaagttgactagctgacagtttattgttctatggtatactattttggtatttataccatgttattttatccaaatcttttcttggatgttccaatgccaaatacttcttatggttttctaattctatatctgggacatccagaatactcataccttgttgtacctgtacggtcttattatgggtagatccctgctatgctatttcacaattaatttgatgttttggcctatcacttcatattattgttcgagacaaaggacaatttgcaaagaaatagttggtgtactattgataaattaatgcaatttatgtttcctccatgtaggttgcataagagcacagttttctgataaaagattttacaaaactgcaaaagttgcaagtcagagactcggagtattactgaagtgagtccaactcttatagaacttttttgttggtggggttcatccttcgaactataccttttgccacctctgggaatcaattatttcccggaaatatggatttgatttcttggttcctgcagctttgctgatcgtaccacaatagatctgctggcttttgcccttcaagacccaagagggctagcttgatggtacatttctttaatctttgttctgaagcaataggtcaattgtgaatagtttcttttctatgctgcaaaaggtgtaccagacttctttaccttctttaacaatgttgtagttctccaaaaggcccatatttctaaacattttcaatcttttagtccatcggtaccccagtccagcgatagacctggcatacccttaccttattctatttacctgtgttggacttgaggaaatatattagtgttgcaatcttttagccctactcccatgttgttttattctactttaatctatggttatcttaatgcagggagactaatcaagtccaagattcctttttcacggatggatggtcccagttgagtggaccttttggtgggaagcggacaaactaaagcaggttcccacttgacaccttaattttcttcaaaacaactttcttcacaagatctcttgccaattaaattgagacccagaggtaaaattaccacataatcgtcactccgaaaaaaatgtcactaacatcgatagttagtcaaaaaaaaacatcgatagttcaatatggctgacatgctaattcacaatctttgtttgcaacccatcattttaattcaactatatatatatttctctttccgagggagtaatatgtgaaagtattccttttcttcgaggtaaaaaaaaaggtaccttatcgtaggcgcaatcaaggattgtttgtttagggcatgtttaattcgcgaaaagaaaatatttgggtgtcacatcagatgtttgaccggatgtcgaaaggggttttcggacatgaatgaaaaaactaatttcataactcgtctggaaaccgcgagacggatcttttgagcctaattaatccgtcattagcacatgtaggttactgtagcacttatggctaatcatggactaattaggctcaaaagattcatctcgcgatttccatgcaaaccgtgcaattagtttttattttatctatatttaatactccatgcatgtgtctaaaaatttgatgtgacgtttttgggaaaaaaattaggaactaaacaaggccttatatcgcttgcttgctgatggagtgatggttgattggtgattggaccaatctatcatttcttcatattggcaattgattcaagtcattcatcgtttttgttctaacaattaataatacatccaaccattcttggtaattttgatttggaaagaaaaatatctacctcactttattaaggattgcactccatctacttcagatactaaatcaggtattgaagaaccacccaaattacacatgaggcagtagaggtgtttttaggtaagacctttatacttatatccttagctctaaaagccaagtctggaaaataaaaaacaactaaacaagccccctaaattgattcaaattaagttttaaaatttgctgcagctcaaattaagttctaaaaaaagaagtttactatagattgtttgtacagctggttttaagtatttaaggacattaacttgaaagtagaagtgttcagtagaccttataaattagaaatagttgatgtcttgaaatttctaggctcatgtttcttgtggtctattagtggtgtaaaagcactcaatccatttcaaccctattgaccaagtgctgtcacgtgggtccaaatatcagttaaagttaaaacctactactacttgccttccacttccctatgtcaagcgaaacaaaattttaattgtagttcagtatattaaactccgctagattcaatagattaggcttgcctcaaagacaaccactgactctctggttgcaaacagtttgtttcccatggcttggttggtttgagcagtgttgtagtaccctttaaaatttttccttgcatgtgatgcgagagagcggatgggaaggtgaaaacgcaggaacagaccctatgacccctgcccctatgcttaggtcgtgtttagttgtttggtcaattttttttaagtatacggacacacatttaaagtattaaacgtagactaataacaaaataaattatagattccgcctataaactacgagacgaatttattaagcctaattaattcgtcattagcaaatgtttactgtagcatcacattgttaaatcatggcgcaattagtcttaaaagattcgtctagcaatttacattgcaaactgtgcaattgattttttttcatacacatttaatgctccatgcatgtgtccaaacatttgatgtaatatttttggccaaatatttttggaatctaaacacacccttactggatcctttgcgttctctcgaaccatatatatccatgctgtctgtgccggatacatgcattgcgcaagaacaacgtgccataaatcattcatactgtgccatcttagcttaacttaatgcttactgtagctcattgtgatgtgactttcaaatctgatatctaatcttaagagcaagtttaatagtatagtcaaatattagctccaaatcatctataatcaatttaatagccaatctatataatagttatctataaacatatactacacttttaatatctacaaattgtgtcttacagtccgtgttatagctgtctacaaatttatagctccctgctcttctctcttctcctttatctcctcgaaatatgtttattgttggcttataatctgttattgtgcctgctctaacattctcgtgctatagtattatagacacatgtcttgactaattttgtctaaattatagcgggcaatttgattaccgccgttttttaagctatacttttatcttatcagttatggcattggccaaactctccacgataattattgcctattggaacctggaacattagtagcgtagattgtactcctttggaggaatcctaacttatggttaaacctcatggaaaattcactttgtgtccatacgtggttgaatagttcttttgttttacaatttctaatgactatagatttgacacttcaactcttgtgttttcctaatcccgtttttaaattcatgagtcccctaacatattgttgtgtgttccacacagcagaacaaagaatcaacctgaattactgaactccaccgtaatagcttaagtgactataatttttcctattttcctgcgcactgtatgctgtaccaacacatatagaagtatctgtttaagccattgacaacaatacatgaagcatcatagtctatgttaaagttagccgtccttcttttgcctgttcagatgctaacaagctgtttcgtcaaagattggttcctacctgtcttccccgcaggtgaagtcgctgttttttttccatgcaactttgcaatcatgcttttgtcttttgcctgttgagattttcagaatggaacttgggggtaagtatcaggttagcagcagaaaacaacggggccgcatttcggcacactgcatccatcaaggaactgttgagtttgacttgccaggtacccctcttcttccagaatccaatgccccttgcccttgaaccctttatttttatttttgaaacttattgaaccctttattagacgtgctttcatttcccgtcttctttcatgtgaaacacccagagaatatcatcaggtcatcaggagcaacttttttttttagggaagtcatcaggagcacataaatgttttatcaagaaagccattttgcatagtataaaaagttcgaaattaactgttaacatatattgtagtaaacgaatgttagcatttggtagtaactgtcattaaaattaaattaatagaattttcactgattttttttctgttttctggatttccttttctagcaaaacttatccttgtgaattctagatctgtagattttttttttggcatttatctcaaatttaatctatgtgaaaggttttattttagatttttgttgctgttcaaatgacttattctaatggatttttacgagatgaacttttattatattagtagtgagctataaaccaactataaacttatgtgtaagagaaaaacaaagaaaatgcatgagtgttggctcttatacaagagaaagagaaaagcttcacattaaattcatagtaagaaaaagattcagacaaaaaatagagcaaactttatagttaatttattatacatattagctctaacatggactaatagctaattgttagctctattattaaacttgctcccatgaaacaccatagaggtttcaagaatttctcttcctcggtgcctctaatattgactgttgccccattcagtagaagagcctacggagttattgcagctgcagctacaactaggcaacaccattctagaccctcttcattactgcacatgcaggactgctcactaacatgtgggaccgatggtcagtggacaatgggacacatattattgttggcttgtaattgtagtaaatgggtagccgaataggccctgtatagaatgatagaataatttttgggagtagattacatgcacgtgaaaatttattaaacttcagtataactatcgttttgttattatatatgggtttagtttaattttgatttaagtttgaatgctttttccacgtaattttgtatatttatgaactgtaagtttatttcatgtttagggtataataatctactgctcaacattttatgaagaaaaaaaaaggttctcttttaaatgagtaagtaatggagtaacggaaaccattgaatcctcatctactccctccgtcccaaagaaaaacaaaccctagtttccatgcccaacatttgaccgtccgtcttatttgaaaaaattatgaaaaaaattaaaaaaacaagtcacgtataaaacattaatcatgttttatcatctaacaacaatgaaaatatgaattataaaaaaattttatataagacggacaatcaaagttggacacggaaaaccagggtttgccttttttttttgggacggagggagtagatgagaacttttaaaaatttcaagcacctgaaatctgatactcccataattctttatttgcgccgtgggccctctcatttatttttttatataatatgtggaaagaatattctatccttatttttttcgctcacaggttttctcttaattaccttttttttctcttttttttcgatggtgcatgaaaatactagtactatcttatactgtcgcttttcctctttctacgagtgtcagatatggtggagttcgagttcccaatgcttcagttggcccgccaaagccatccaatttgccgagacggacaccccgcgcgcgacgccacgccaccgcgcgcgaatttacgcggttgcccctcggtggagtccccttcgccgtaattagcccctacaaggaggggcagtctcggcgcgaaacgttgactcccctgcactcccccaatcccctccacgtcaacacggccctgccacgtcactggcgaactcttcccctgctccccggcgtgagcggagcaggtgcggacaaaacggcccctccaccatactaccagcaccacctgacaatttgcgttctcaccccaagttaaactcgtaattacgtgtagccccctcctaggctcaccatttataggagattttttttttcaatccggtacttgagaagggttggaattaggatttggggttcttccttggtgcctggtaatggctaaaataatccggcctagcgcacggtgcactcacgaacgaacgactgcctcggccagtgggggcgtactggtaagaaaagcccactcgttactcgttagtgctgcctccgcatcatctgcttgctacgctttcctttctcctaagagcattcccaatagaaaccacggtagcagtggtcttatatgaaccatatagcctaagagcatgtacaacagcgggctaaaagtcagctgtaaatatattttaaagagataaatgagaagaaagaagggcagtgggctatagatttgtagccagctgtagcatggatttcaagacatagtgtgtgtatgacaggtgggactagatattaatagtgtagtatgtaactattgtatgaatgagctattagattggctatagataaattggagctagtagttggctatactattgaacttgctctaaaatcatgctatataagagtaggacacactacttctattgaaggttacttcttaatccccccgtttcataatataagcatttttagagttggacacggttattaagaaagttggtaggattaaatgtgtgagtatagtattggaggataagtagagataggtggaaaattaaatagtgtagggttataattggttgaaaagagaatattagtggagaagttatattttatgataaattttaaaagctataagttgttatattttaggacggagtaagtaaatattacgaaatctgaggatactttgcgaagataagcccatcccagcccacaaacacaagcgctgttttcctctcctacccttttctttattttattcggcccactccccctcctttttctcgtctcctccgccccagcgcccggcgcctccccttctcttcaccgccggtcgtcggcgctgccgactgcgccccacgcgccacgacgactcagccccaccgcgccgcctccgactccaccccatcgcgccaccgccgactccgcaccaccgcgccgccgactccgccccaccacccgtcgcctccgctcttcgccgcgccagatccggtgggccgcgccgtcgactcctccccacggcgccgccgacgactccgcccctctccctccgcccttcgccgcctctctctccctccgcacggcgagaggtgcgcgcgagccgagccggagggggaggggagggggggagggagcggcggatgccatgggcagcggcgcgtcacggctgctgaccgcgtgcacgtgctcgcggccggcgccggcgtccgtggacgcggagccgtgcctggacgacgctctcggccactccttctgctacgccgccgccgccacggccaccgcccactcctcgtcgttccgccacggcatctccggcgccgcgctctccgccaactcgtcggtgcccgtcccgctctacaacgcgtccgccgccgccggcggcgtggcgccggggtactcctcggcattccacacctcgtcgtccttttcctccgcgccgctgcagctgtccaacctctcctcgggcccgctgttcctctcgggtcccatcgaccgcgccggccagctctccggcccgctcgaccccgccgtgcccttctctggcccgctccccgcaaagcctcccaagcccgcgtcctcctcatcgagggggttctcgaggaggttccggaagccgtccttcggcagcctgcggcggagcgtgtcggagaagaaccgcccgtgcgccgtgccgctccgccgcgacgacggcgtgcagtgggcgcacggccgcgccggggaggaccgcgtccacgtggtggtctccgaggatcagcggtggctcttcgtcggcatctacgacggcttcaacggccccgaggcccccgacttcctcgtcaccaacctctaccgcttcctcctccgcgagctccgcgggatcttctacaaggaggccgacgcggacaacaagaagctctggcagtttctcgtggacggcgacgacgacgacagcgagctcgacttctcgggctctggccggttcgcgctgtcactcgacaggctcaaggagagtcggtttcacatgtgggcgcacgccgcggccgacgagagcggcagggaatggggttccaggaggttggcaccggcgcctgcggtgagggaccatgcggcggtgctagccgctctcacccgggccctggcctcgacggaagcggcgtacttggacatgaccgaccagtcaatgggaacccatccggagttggcggtcaccggggcgtgcctgctcgtggccctcgtgagggacgacaacgtgtacgtgatgaaccttggggacagccgtgccattgtggcgcagcgtccggacgatggcgacgatggctgtgtgtttggaaccatgcggcggatggaggacgtcggggtgggcttggagatcgagacaaggcccggcggatgcgccattattgggcttaagccactgcagctgtcgactgatcacagcaccagcatcgaagaggtacattctcgttgacataggggaacaaatgcttacacgtgtttacatgcaattgcctttcttgtatccattggttggcacaatggcacgggcgtatggggatgctcatgtcgttgtttgggaacaatgtgctgacttatctgaatgcgtctgcaatatgactactatcctcttgcacttcaaaagccagaccattgccctttttcacttttgctttttatatttcagtacttcatataactagttatggtaagcattgttagtcgcttcctttttttatcattatttttatggctatgcattaatatcctttgtgttggtctgcaggaagttcacaggatcaaacgtgaacatcctgatgatgatcagtgtattgtaaatgatagagtgaagggtcgcctaaaagttacccgggcttttggtgcaggctatctcaaacaggtaattgtgatactgtttgagtgggtcagccattcttttaatttgattcttatacttacgatgtttgttttgtgtggtatacatatccatcttcagagcaagtgcatttgttgtcagtactttgtacttttaactagaaactatatctgtcatgtgttctgattaatccaatgccctgattgaattaatatagacactagataattcttgatcatagaacttcgtgtatttgtgcaggcaaaattgaacaatggattgttagagatgttccgcaatgattacattggtgatacaccgtatatatcatgcacaccatcgctttgccatcacaagctcactgcaagggatcagtttttggttctttcttccgatggcttatatcagtacctgagcaacgaggaggtagttttgcatgttgagaatttcatggagaggtttccagaaggtgatcctgcacaaagtttaattgaggagcttctctctcgtgcagcaaagaaggctggtaggctctcttctataccatacctcttgcttatttcaattcctgattgattctcgggtggttttttttgtcattgtatataacatcatgcgtatagaattggatgattatgtgcaaacattgatttgcctgcacatgtttgtctcggttgtcaaaacttcctatatcagtccatggcatgtgaggaacttctttatacttttaccaatcattcttgacataaagttctgtttgatgaaatagtcagatactcatgcaactccctcaagtttgtgatttgataaaattctaccagtgtatccttggcttattgcattgcccacctgtatatgagaccaagatacactttacacttttactacatcacaaactccactatggcttagagtgttagagatgattgacattgtcctagcttaacaattatggtttctcgaaactgtttgggccagtgagctaatcagcctgcatgctcgcacacttggagcatctgtccctcttgccaagaaatgaactacagctggattttgcaaactgggtatactgtttttcagcactatgtgtcctaaggtgcaagctggttaagcaaaacaaattttgcattgttggtgtaaagaacaccatggttcagttggtaattttggctctactgtaggatatttttgtattgattgttatgaacaacttgcagtcatcatcattggtacacgtttgtgttgaatatttgaatttcaatagatgaatgtcttgtcgaaacggtttccagttgtctttaatgtcaaatacatgtacctttttttttctcctttctccctcagtaataccatgatttaacttttacttttgtttctttaggtatggatttttatgagttactagatatacctcaaggggaccgaagaaaataccatgatgatgtcactgtcatggttatttctctggaagggagaatctggaagtcgtccggaacatatgtgtgatgatcagttggaacaatgtcgatgtcaatatttatggtgacgcatcaagtgatctcagctggtcagagcctctgagcaactgcatttatgctcatcaggggagaaacacccacagatggctgacagatgatgcactccatacatttgtcaaagcgattggagttggagccagcgttggtctagatcttagcttcagcacaaaacacagtccatgaatgtgctagagagttaattctcggttggaccaagattgcagagagagatgacacatatgaggaatccctttgcaaagcagagttaagaacactttcttttgtgacccgcttagttgattggttacatactcacctgtgacaattccctcacccccctcccccctagctggctagctatgctgcatagagattgacacttctttcatttttggagaaagaacgtctttggaaggcgccgttttcatgttcatgtcaggaatgggaaggaaatgtaatatgattggatattcatggtgaagaaattgaaaatgtgtccctcatgtggtgctcaacatcgttttcgtaaagtcctgaactcctgatagtccattggtattttgcgtgctcgaataattaggacagcagttgttatttgttcggttggtcctatatctactgttgttcgcagttgcctggaatgggccgtggtttttgctggctggatcgatctctcttggtatgggtcgacgccagcttgttttcaaacaaattgcaagtgctatccatttgatgattcagtcaacgattcagcaccgtcgaccagaagatttctaacatttgattctgatttcggtatcggctaagcaagaagtaaaaggcaaacttaacgctccatttggaatgatggcaatttgcatgaatttcatatctgaaacgttttcacttcctgtgtttggcgtaaagctaggtatatttataagtgacactctgagattacaaatgtgtgcactcaattctgaaactgcatgcttgttccaaccggatttcccagctcaattcaactttcaaccgtttgatctgaaatggatagttgcaaccgaactccataagattgacctgcagtcatctatgtaatccattcatccccagtttcaaagtcattgcaaagatcaggtaaaccttgtaacggaggaatcccaagatgaagatatcaaatctttgagatactctagcctatggttggatctttaggtaacaagaaatttacaggagaaatcacttgtacgactagcacgatctcttggcagattagtacgaagcatctgatgatatattataatggctttacgatcggtgataattcttaggatgcattttatatgtgcattagtcaacgtctggaatgattcttagcgatcatgagctgcgtttaaatagtcctttgataaattttttttcaaggatttgaaagccatctgcttgtgacgtacctactggctactgagatacgaatcgcattacagggtcaatgcgaacatgatctgagaggtatagtgcgttccatgtatacttatgcatcctcagatcagagagtttttctattggtgtattgcacgttagctcagcgtacacaattgtgcaaacaaaacataatcacctttctaattattttcgtctgcatcactgcaaagacgtttgagattttcagtacggaatccgttcttgaaaggaaatggtatcttgttcttgacttgtaaatgttaagaactttcggcgtttgacttgagcaagtggtggtatcttacttgtttactccgaggagcttagagcgcgcgcgtctcacttctaggacaggaaacatcgtcgtgcgaagcgctcaaccgcctgcaactaaaatcatatgaactgtaagcaaaagagttcaacaatatacagccttgcaagagaaaagcatgaaaatccttaaaaatcaacaccaataatcggaagatatctgccgtccacacccaaagtgtctgccgtctccatttaacaattcatgatatgcatatcacatttgtcattttcttatgttttttgttttaaattaataccatgcatattgcatagtctcctcctaactactccagtaaaatttaattagtggagatattaggattgcacttggtcatcatttgtcaagtatggccacaaacatttccaatttccatcagatttatggatgtggcatggcatacatatctcgaaaaatactacataatactatatactatgttttagaaaatggaaatgttttgcacgtcacttgaaaaagtccaatttacaggtcacatcaagcttccatgagaccatgaccttctcaccactaattgcaagcatctcttacctttgactattgacttgcacacttgccagcccatatgcccctacaagtatatataatgagcccaccgtgtcattacttgctcagcttcagctctgtgactgcgacgcgaacccatggccgccatggacgagcctcctcagctattcctctgcccgatctccatggagctcatggaggatccggtgacggtgtccaccggcgtgacgtacgaccgccggagcatcgaggagtggctcttcgtctacggccggaccacctgcccggccaccatgcagcctctctccaacttcgacctcactcccaaccacactctcaagcgcgtcatctcgtcgtggctcgatcgcggctcgtcgtcgtcgtcgtcttcgtcgccgtcgacgtcgacgctgtcgagcccgatccacgagctggcgacgccgctgtcgcgcgcgctggagcaggagcggttgctggctgcgctggccgagctggaggagacgccgttcaaggtgaccaagctgaagagcatgagggcccgcatggcgggcgacgtggcaatgcagggggagttcgtcgcctcgggcggggtgcgcgtggtggggcgcgtgatggcgcaggcgctggcggagagcggcggcgacttctcggcgttcgccgcgtgcgaggaggctgccgcggtgctcgccgcgctcccgctctcggacgaggcgtcggtgcgggtcgtccttgcgccggagtgcatcaggcccgtcatggcgctgctccagcgcggcggcgccgaggcgaggctgcacgccatggacatcctcaccaagatctccagctccggatcaggcggcgactggaccgccggcgtcgacatcgacgacgtgatcaagtccctcctcgagctcctctccgacgaggcctccacgaggctcagctcgcgcgcgctcgacgtgctcctcgacgtcgtggagcgggcgcggggcgcccgcgccaaggccgtcgaggtcggcgccgtgcacgtcctcgtcgagctcctcgccgacgccgacgaccgccgcgtcaccgagcgggtactgctgctgctgaagcggctgtgcaagtgccccgaggggcggctcgccttcgcggagcacgacctgtcggtggcggccgtggcgaggacgatgctgcgcgtgtcggagctgtccacgcagctcgccgtcaaggtgctgtggctcgtgtccgtggtggcgccgtcggagaaggtcctcgaggacatgatgctgaccggcgccgtcgcgaagctcctggggctgctccacgtcgagagctcgccgtcgacgaagcagaagacggtgaggatggttaggatccacggggtagtctggaggcagtacgcgtgcttccctaccgacttcagggactacctcaggctgctcgattgattctttctcccctctctttctgattaccgtggctaagctgtaacaacaaagcagatggaaattgtgtttttttttctggtccctcgaaaaaaagaatgtgtattttttacagaaaaaaatcggaaatgtgttttctcatcacgtacaaaaaaaaagggaacgtaatgcatttcaagtattcaaggatatcatcgagattttcaggcgacatttcccctggttttttcgaacaaaccaatcaagtttgattcggatattatcccccctgatccaaattctagctgttggcaccaccaatctataaattgcggcatcggtattgatgaatagagcttttttacaggccacatcttctagcgataatacgtgacacttcgttcgtttcacaatataagaatttcttacctgtatttatatagatattaataaatctagacacatatataaaacatatacattcatcaatgaataaatgtaagtaacaccaaaaggtcttacaatataaaacggaaagagtacttcttaactccaacacttcgatggtaagttagtgttgcataacaaaatgttcctatgcgtgagcccgttgtctacattcagtctggcttttgtcacatgtctcatacaaccttcatcctaaaatataattatttctaactatgtactctacctagaagtatgtaaaagtatatagctaaaagttgctatattttgagataatggtagtataatattgatgacaaacttagaagttacggttgagtttgctaggagcttgtttagggagcaggaggagtaaattctagagggatcttagatggtcttattgttgaggctgcatttgaaaagaggcattaattagataataattcacgaccttttagatcaggcacataatgcggtaatgcccatgaaaatagagtagagtaggctagacatcctcgtaaattatggtatagtctagtccatgtaagttaattttatgggcttccaccacgaacaataggttgttgggaaccctcagtgagggaaaggagaggctgagagggtgtattgacaatatcaaacaagttataagtgtttaaaaccttatattataactatcgaatctttttaaaaccttatattataactatcgaatcttactttggtctaacaaatataatcatatcgggccatggaaatcaagaaaagtggcaattgatcacttacatgttcgaatggatgaatttatgtgcaaaagaatgtccatatatttccttttaaatcaaaacattctcttaagggtaaatagacgataccacaacaaaagtataccaagcatcttaccctatgtcaagactttatttaattggcaacaacacatgctactcatggtgtaaatctcaacaaaaggaatatcatgttatgagctaaataacttgaatacgaccctacgttaatcattaaaaaaagagtgaatttcgtataaccacatgttctatggtcaaaattgcagaaaactgcatgcattatgacttttgacttgtgacacatagtcacatatttttatggtctaaatgtttcataaaaccccaccttgattcaaatttcaatttgatttatcatatatgaaacaatatttttcaaagtagtaaaaaattaagctaacaaccttaatcaaataggagtagacctacttaaaagcaaatgttttgggacgatggtttttccatgtcttaataggtattgaagtctttcttacttccagtaaaactatgcaactctgtttgccttctgatttttattactagtagcttaattaagaatgaacataattttacataaatttcaataaataacttgaaaaatttagaaaaatacttccttccaataaagtctaattacgtatgcatgactaattgacatatccattatattggtctatctttcatcccaaaagagagaaaaaattgtcttgtttgttaaccaactccacaagactacattggttctgttcttgagaattattttcaggtctacaattattgcattctggatttgggactagtaaaatttcttcaggattattgctgctactactgtttcagatgcgatgaaatttgaaacttctcgtgggggccatcagtccaacaccaaccgagcttacctacaataggcgaccacggaaatatgctctcttgcgaggtccatctcgaaaaagtacacgaaaaagctccccggaagggaagacgacctggggctggttgctcgtgctgcccccgagatctaaccaaaacccgcgtcccatctcacctcgcctcacctcaccatccgacgagcccccggatcaccggctccgacctgtcgccggcggagagcgccgcgggatccaggcgttgaggttggggagcggggtgtgtgtgccaggcgctcgggcgggggcgagcgggcggcgacgatgccggtggcggcgtcggccatctacttcctcaacctccgaggggacgtcctcatcaaccgcctctaccgcgacgatgtcgggtgcgtagtaccgttcgcaatcatccccccctcgcctcgcctcgtcgtctcgccgcgcctcctgcgcccgcgccgctcgtggtttggagtggtagatctgaggccgttgggatcgattagctccgtttcctagctcgccgttgcgcggatcgcgcgaggtctagtggatagctcgtgaaattccgctcggaaaggcttcgattagcgaacgggatgcggggattgactcgttgcgtgctgaaatttggcccctaccctcaggttgtcgcaataccatgtggttgaatttcggaatggtatctcgttctttagcttgtgattgtggaagctacatgttttgcagcatgaaggaagatgccactgactgaaatactgaataggagaattagttcgatttcaccttggatggctgtgctgtggtggtcgattatctgaaacaattgactttatactatttcccctccacattctgaattcgatgttgtgttgactgaagcatttcatataagctgactgctgcatagctcatatgatctttcctagtggtttactatcgagaaagatatagcaagtggccttgttgtctttaatacgatagccattattttctaagggtgctaaaaatgtaaactaccactaaacattttcggtttgcttgtcttacttaaaaccctcttttttttggtatttggttgcgtgcaagtttactgaccacctgttttgctcattatgtatgactatacaggggaaatatggttgatgcattcaggatgcacattatgcaaacaaaagaactgggtacatgccctgttcggcaaataggaggctgttcattcctttacatgaggattagtaatgtctatattgtgatcgtggttagcagcaatgctaatgttgcttgtgctttcaagtttgtcgtggaggtatgcaatttatatcatctttgaataatttggaataaaataaatataacatgcatacatattacatctctatgatctagatgaatatgaagctcaagaagtcaattgttgttttttccgctagaaatggtatgtctatgttagtgtgttgtagcatagatggctagtctaattcctcaataagtccagagcaaaagaatctattagttactaaagaggcatatgatttttctgaagttacctgtttaataataataataattttaaattgcaatatgccgtcgaaaagtttagacagttttaccatctaatgatggtatgttttgggggcaactagaattttctatcgcttaagcgtaattgcgtaaatggtgatgattttttgaggaaccaaaagttttttttttccttgaatggctacatggtcgatgttccttgttaatcattgctggaaaatactccttaagccctgtttcgatgctttctataatttcttaagccctgtttgatgaggctgactgggcgtagaattagtttaactagttggtagatgtgagtcaataatgaagcttcagttataaattctagacatatatccttctgatacctgcatatcatcctctagtgttttgaacggttttttatgtatgattttttttgtaaattaccaggcagtggctcttttcaagtcatactttggtggtgcttttgatgaagatgctatcagaaataactttgttttaatctatgagcttcttgatggtaagggacatcttatttttggactttgtttcatcaatttgcactgtggatgcttctatttacctgtagaactgtctctctcatctaactgtgcagaaattatggacttcggttaccctcaaaacctctcacctgaaatcttaaaattgtatataactcaagaaggagttcggtcgccattttcctccaaggtgagaaaaatgtgacattgaaataagataaccggataaaaagtcacatcaaatagtttgttgctcatttattttgtgtgaaagcatctgaatcattttttttttgttctctgcactgatagccttcagataagcctgttccgaatgccactctacaagttactggtgctgttggttggagaagagagggtcttatgtacaagaagaacgaggtgcctgttccaaatgccacctccaagtttcatctgtatttggacatattatgcattgctagctagctagcatttctaataatcccagctcagcatagatgctagtaatgtcagaacgctgcatgtatttcgacatgcagaatagttttcatacatattgtcaatgtgcactagattgcctgttacagaagtagtccatactttatttgttgatttctttgttgccattttggttctgcatactttatttctttttagcactttgcatgactctttttagcattgagatacactaatatagtattcttttctcttgaaaggttttcttggacattgttgaaagtgtaaatcttcttatgtcttctaaaggtatttcatggattactatgattttattgtactgctctgatgtttttgttgtccttaatgttgctttgactgatgtttaatgtggaaattgccttctctgcagggagtgttctacgatgtgatgtgactgggaagattcttatgaagtgcttcctttctggaatgcctgatctgaaattgggattaaatgacaagatcgggcttgaaaaagaagctcaactcaagtccaggcctgcaaagaggtatcactttatcaataattagtacatgaagaaaaaaaattgagcatctggtttttctgattagtatagtttatatggtatgtacacaatctttactactttaactgaattgtctgctggtcggttctcctttttcctcaacagcggaaagaccattgagcttgatgatgtcacattccaccagtgtgtcaacttgacaagatttaactcagaaaagacagtcagctttgtgccgccagacggtgaatttgaattgatgaagtaatattatgatccctccttatgcttgtattagttttcccctgtagtgacatttttattctttacttggcttttgaccacaaaattctgttgtagatatcgaatcactgagggtgtaaatctcccattccgggttctaccaacgattaaggaattgggccgaacacgcatggagataaatgttaaagtaagtgtgcatatctgaaattgtgaatgcatgaggccattatcacgttttctgacacgatgaaccttttacacaggttaagagtgtttttggtgctaagatgtttgcacttggtgttgtcgtcaaagtccctgttccaaaacaaacagcaaagactagtttccaaaccacatctgggaaagccaaatataatgcttcaattgattccctagtgtggaagtaagtgcaaattatttctatatagcagtttatctatgagaaagatgttctttggcttttctttttatgggttaggtcttgttctggcagagcataaacataaacctaccaatttttgttggttacggtgtacaaagctgtatccgatgctatattggctcaattttcttactcttgaagagctactccttgccaattttgccacaaatttattagcatgccttttgcactcataagtcttgacacacttctgcaattataggatcaggaagtttcctggacaaactgaggcaaccatgagtgccgaagttgagctgatttctacaatgggggaaaagaaatcatggaacaggccgccaattcagatggaattccaggttaattttacctccttttgaacaaccctcttatcattagcaaaatctgtcagccagttcattttatttttgagcttacagaaaatgcaatgttagagatatcataacagttatgaattaaacttgagcatgcacaagaaaaaaaaatggtattccatcattcgttggcctttgagtatgtttattatccgaggtgttatcttgaagtgttcttacaaaaaaaaacatcttctgcttcattgttatgctgataaaatgtgccttcgagtttggttatcttgtttaaccatgctttctgatttgttgtttctgtaggttcctatgtttactgcttctgggttacgagttcggttccttaaggtacgtgcagggaatgctaatatagaacctttttaacacataccagacagttcagaactcatgttgagatgcatattccaggtgtgggagaagagcggttacaacaccgttgagtgggttcgctacatcacaagggctggatcatatgagataaggtgttagcgatgaagaaaaaagtcccaggtatttggcacggttatttcaaggattcgcggagctttctttctagtacggcgtcatgaatgatcataaagcatgtatattacatatgacaccactttttctttaagctattactttggcaaagggtagagcagagcagacaaattttcctgggttcttgtaatcgttttgacacgggatatctagtatcccctgagtcttgtttgtgtggtagggcatattttcatttgtatatgagaagatggcggtagcgtttgttcttgttgatcaatatacatatactcattggcagtttgtattgctttcttattaaattgatgggtgaattcacttgcagaagcaatgtgtataaacatgtgactcgacggtgctcgagacatcgactcctgaagtatacagtgtcttaacattttttgaggttttttttgcccttttgcgaatgactatttgtgattgccaccggagtccatgcgttttatagggcttacattggtatcgaatcaattttcgtaggaatctgaaatatttcctgcgtttcatcatagtagttgatgggttgagatagagatagagaaaaactgaggagtcagctgatttttatgatagctatttattaagatacaaacgaataaattaattcctacagagttgaaatcaaaaggtattctaaaaaaatattactacacctagtacaaaggtgaaaacttattttagaaaaatattttaagaatagggtagtagcgcatgagcatccgattcgatatggcacgcatctccgtggcgtcgttgacactaacaatgtcgcgtgattcgtacgggagtcgggacagcctcctcttgatctcgtaaaaatattagaacttcataaaataacagaaaacctatacaacgatatcccattagattaggatacccttttatgagatagtatctgattcttttgtgatactagctgtatggtacccgatacctgtaataccatgttacatggtacctataataccgaggacatgaaacctgtgatactcgcaagagaatagttaatatgtctatcccgttgtagtgggatcccgttttatagcagccctcgataataaagttagatagattttttgaactttctttttttctctaatttgcaaatctatttttcgatctcgttttcatgtccaactttaattgtccattttatttaattttttttaaaatctaaaaatataagtcatgcataaaatactattaatactttataatatactaatagcaacaaaaatattaatcataaaatttttttaaataagatgaataattaaagtactattcatgttttattctaatatactaatagcaataaaattattaatcataaaagaattttaaataaaacgaacaattaaaattaaacacgaaaacttatagctacgcttattttggatagagggacttgattggctgagtttgagagtaaaggaaataagaagattaagaagagacgcaaaataaggtgagctattagcgcatgatgaatataactattttaaaattttaaaataaattaatatgattttttaaagtaacttttcaatagagttttttttaaagaaaaacacatcggctagtactcctccgtcctataatataaaggattattgtttgaccactcatcttatcttaaaaaaatttgtacaaatataaaaaacaaagttatgtataaagtaatttgaataataaaataagttaaaaaataaataataattttaaattttttttaataagacgagtggttaatctttatattttatattagggtcaattgcatatttgccatcggtttgaaccggtacggtgaatttgccattataaaaaattttattgcatatttgccaccaaacacagatagaacccaacaaccttgccattagactcacagatcagactaacactgttagaaggttggttttgatgaaaattaggacaatgttaccttgccaaggaaattgaagcaacagagtctttcctctcctttttcttctgccgccatggtgctgctacaacatgttgctgttactgcagtccgaagcagcaagccgctgcagctgcccaagatgcagccgtgctcgccgatgttgtttgccgcagcttcacaagcctctgccgtgctcgccgctgctgcttccgtagcgtcacaaactgccgccgcgccgtcacgccgtggccgcccgccttgctgccccgcaaaatccatccccgccttgctgccttaccatatcctactttattgcaaccaatttttgtttgatttgctcttgatttggaagaagagatgagaggatttggggatgtagtagggttcgaggatagggaagggaatcggccaatcgggacctgcctttctgggagatgggggcttctgcgtgcgagaggggtagggaggggggcaaaacggtcttgttgtgcagctttgtttttcacattagttttatgaattatttttgtcttcttatttgcactagctcaaacggtaatggtaaacggaaggtacacatatcagttttaatggcaaatttgcagtttgcgtttttttaatggctatttcgaattagagggtaagagtagtggtatatttgcaattctccctttatattatgagatggacggagaagtagtttgggaaggtgttttctctcactcaatctcccagcaacgaatagcaacctaggttcccatcgcaactgaccgatccccagccgccgccgccgccgccgccgccgctcaaggaagcgcatcagatggcatcgccgtcgctcagggacgccgtgggcggcctcgaccgcgaccccttcgtctccctcctcgggaagctcatcggcgagtcccgccgcctgcagaacgacccgccggccctcgtcccgcaggaggacctcgtggcgcagcacgtggtcgacgcgctcctcccggtgtccatggagaccgggggcggcccgctcgtcgtgcggaaggtgagctacgccgagggccggagcaacgtcatcgtcgagtaccccggcaccgtccccggccgcgccatctccttcgtcggcatgcacatggacgtcgtccccgccaaccccgacgaatgggtaggttgctatggagattgttctcctgacgctgtcaaaaattgcttctcaagtttatgcttctttatgaattaatgatttgagtggttgcttgatttggtgtgtttctgccggatattttgattttgtgatcttatctaatttcgttgatggttgcctaaattgcatcattctcatatttacgggtggattatcctggtgagtagtgaccttgtttatgtgagctggtgatttctccatagtaataaccgctttgttgtgtggttgttgtaagaaaataataagttgcatgctagcgttgcataagcatattgatagatatgatgggatatagtaatgtgaaaaatggcatattgtttacttccactgtgttgtatactgcaaaaatctttgctcaatttcatgatgtttatttttgctcgtgctagctttgttgcgtcaaattactaaaaggtttacctcaagtaaatttctccttggttctaattggtggcccaaacgtctctacttgtccaggatttcgatcccttctcactaacgtttgacagtgaagacaaggacaaacttaggggccgtgggacaaccgactgccttggccatgtggcgctggttgctcagctcatgaggagacttggtgaggtcaagccggtgctgaaacattcggtcattgcggtgttcattgccaatgaggaaaactcacttatcactggcattggtgtcgatggccttgtgaaggatgggttgctggataagctcaagaatggacccttgtgagtattgtgctgtttgatgcatggagggaatgtccgactaaactaatgtgttgttcgtgaggaatatgtgctgatttggttgtcattgttgtgtggcattgtgaaggttttggatagatacggccgataagcagccttgcatcggcaccggtggagtgattacatggcatctgaaggcaattgggaagctattccacagtggcctcgcacataaggtacctgatttgaacttgtcagaactcagaatagtgtacttgttgtgttatatagctccagtaggttccagcaatacactgcttcgtggaaagaatgcataaagcatatggttcattttctatgacctgtgttcttttaaattgtatagctgcataaattaagcttgcatccttgtagttagtgcaaaagcaacaatttatattgatcaatgccaaattgaaatgacacaaaaaggataaggaaagtgactgcttaaacatgagttatgttgcaacttacagcgtgatcactctgcttttgaaatgttatctgttgcaacattaccccttggattttttttggggggtaaaaagtgcagaacgtgtcttcatcatgctagggaagattcattcgaatattcaattggcttagagggacaaaacaatttcaaacatacaagttgggagacaacaaatattgtatttgtatatgaattacttttcttttgtgtgtgtcaggccataaatgccatggagttaaatatggaagcactgaaagaaatacagactatgttttacaacgatttccctccacatgagaaagagaagctctataagtttgctaccccatctacgatcaaaccaacaaaatggagctgtatgttcaagttttacttgtgttttctaatgttacaactttttagttgtgtttcctaatgttaaagaaaaccactgtgtacaatccatgcaattaacaaatggtgatttgcagatcctggtgggggtctgaatcaaattcctggagaatgtacaatttcaggggatataaggtccaactattgctatatggttcttgaatgcactttaattgtactcaaaagaaaaatggtccaagcttttgttttattatgttcatacattgttataggcatggggacatgcggttggtgaggctttgttcctcccaggggccctaccataaatttgcttggtcatttaggcggtgttcttttctactaaagatgaagttagggcacataaaataagaaagccaatagtgcatgattaattgagttttaattattaaaaacttgaaaaatggatttacatgatattttaaaacaatttcatatagaaagcttaagcacaaaatgcaccgtttagctttttaaaaagcgtgctaacagaaccgaggtaaaatctatgtcttaatcagaaaagaacggggccttagtgttacaatgcagcagagtatcactgcacaaatttttatatgtttgcaggactaggggaaacaaaataatgggatcaccagtatttcacaagtcacaacattcaataaagactgatgcttctgttgtttcttccatatcattgaaaaatagttttttaaattatactgaccatatttttgtacatattacaggttgactcctttctacaggtaaagcccatttttcatgcatggactgttctctctcataattttgtctccacttctgccgaatgttgttttaatttgacagttgcatgttgccattcatacagcacgacatctgtagtgaagaaattacaagagtatgtacatgatataaatgagaacattgaaaagcttcctactcgtggtccggtatctaaatatgttcttcctgatgaaaacctccgaggaaggtgaagcatatatgactttattctcttatggcagtaacagtaaccatcataatttacagattgattatcaattcgccattacttaccattgatcttgctaggcttgagatcactattgatgaagatattatgaatggggtggcctgtaatctcgagtcgcgaggctttcaagcattatgcaaagcaactgaggaaattgtcggccacgtggaaccatattccattactgggagtctgcccctgattagggaattacaggtttgagaggaaactggtgcaagtgttatcttgggaacaatcgccatttaactaaaacaaattcctcttcaaactttgcaggatgaagggtttgatgttcagactgctgggtatggtaagtaccttaccaaaaaactgtttcctgatttctttaggtcatgtcatcaatgaacaattaatggaaaagtctgttaacagtattcacatggttgagagtagtatagattaaattatgtataccgttcattttttgttgagttccacttggcatcctattatattgatatactatcgcggtaaacaagtggaaatgtagacagtgtgctgtaaatgtttatctgatgcttcttctgttcctgtaggcttactcaagacataccacgcaaagaacgagtactgtctattttcagatatggcccaaggctttcaagtatttctgagcatcatttcacagttggaagcagatgtttgagtcttgttttagggaggaaaaaaatgagcgttcactggtacttattcctgttacttgttgctctaataaaggcactcacagtgcaagctacccaaaatgaggaacctcaggctaaggccacacctcctctcccacggtgcaaagatgctttagggtgttcttagtttttcatgtaaacccttgtcatcttctattctagtcctcacatgttttcaaacaacataacatacaaaatttaccactaaacaccctaaaatgtacaaactagtataaaatttctcccccgccctcaatctctccgttccccaatccaccacaacagcgccaacggaagccggcggctccccgacctcttcccagccagtggcttggagggcgacggcggcgtcacgagaactcgctggggccccttctctccctgctggcaacgagggtgacgggggcgccgtgagagctcatcggtccctccacttccggtcggcgatgagggcgcagaggggggcggcggcgcgagagatcactagcccctctactttcggccgacaggccgatgacgagggcgcggagggcggctgcggcgcgagagctcaccggcccctccacttctggccgtcgacgagggcgcggagggcgacggcagcgcgagagctcacagggcccctctactcctagccagggtttgcaaaaccgtcagtaaccgcgcggttaatggtaaaagaaaaaccacgataacctccttaaattcaaataaatttaaaaattaatttgaaattttgataaattttacacggtttcgtatggtttgccatggttaccgcgcggtaactgtgtttaccatcggggcgtggtaacctcggcggagggggggggggggcgacgatagatccacaatgccgtggaggctggggacaagacgacagtgtcctcggtctcgtctccacggcgcgggagcggagcacggggacgaactcagcgaagcagagcggagcaagggggcggcgacggggtcggtgacgcagagcgggagacggtgacgaggtcggcggcataggagcgggagatggcgacgaggtcggcggcgcggatcgagaggcgattctcccttgaggtggagccgacgagctcaccggttgccgctgaatcaagtttccctggcgacgaatcgagtaagctcgccagagtgggtctacctcctcgccctagtcctctcctcgttcattcctctccgcccattcctccctagccatcgccatcgccgcgacccaacctgtccccgccgctttttcccgtcctttggcttctcctcttcctcgtcagcacttggcacccggcgagctccaagcctgctcagatcttggcatggcagcgtgggttggcggggacgaatggggaacatttgggagtagcaacagagaggggaccgctcgcactttctttttcaggcatgaggaacccggaccctagctaggaggcgcaaaccttgcaagggcacgagacccacctccttttctcctccacgtcaacaaggtaacgctccacgtaggagcattgtgaaaggcttaatagttctctgctcttggactcagtccattgtactaggaaatcgagctcatgttagagcataagcaatgggtggcttagggtcgtgcccttgctcatggccgtccgacccagttacctttcgcgcctgagccgtctcctctgctaggcacgcgactactagcggggggacacgcccctcggtcacttttcgttgagacggcgtgggggcacgtgttgggtgcgcggtggcctggcgtgtgtccagtggacaccgctcccacccctatattttaccgttccacccctcgccctcgtcgttggaagtaggcaagaggcacacggcagtgaggaggagctagaggaggcgaggtggtggaggagccggcgaatctgcgatgaccccgcggtggcgacggccccacgacggcgacgggctcaccagatccagggccggcgacgaccccgcgatgccaacgggcggagggagagcggtggcggcgcggcactcaagatccaacctccgcgtgccgctcgccgtggtggaggagctgttggccaccctgcgcaccatcggcggccccacgaagatccgcgacagcgacgacctcacggcagccgacgacgggagagagaggccgatgggagagagaggccaccccgcgctcccctcgcggtcgtccaccccgcgcgctgctcgcctttcgccaccgtgcaccgttcgccatctatggaggagacgagaagaggagaggaagagacaaggacggcagcgtcggtgggctgatgagccctttagctgggctatagaagggtactttcataatttttcactttgtgggctggagtatctttatcaagtggtctcagattttgaagaacccattggaggtatccttcagtgagagatgagttccctagaaaggatcctcagttagtgaagacactctaagggtggctttggatgtagatgcccttgtaccacgtagaagctcttgtcaatatcgaacaattccattgtgtgtgacaatcaaggatggtgcttttccgctgggccattttcgtgggttgttctgacaatggcccgaacttatgaagtctgacaggcagcatttgttcagtttctcgtttcatgggctgcatacctgatggtcatcctcaatagccaggttgcaatggaaatccatcatcttggtgcacgaaatgggaatatgggatatcactacatcctgggcctagggttaccacatttagggtccatttgattgttagcaaaaacataggaaattagaagattttgatttgtatgaaaaacatagaattttagaagattttaatcgtataagaaaaaaatccaatgaagtcttttgaagcaaaggattaaatcatatcttttccttggagattcgtacggaatgaacaatcctatacgtattttgaagaaaagttagcaagaattctaatatctttttcatccgattcctgcgtttatctcacgtcctaaccaaacaaccatcttgtgtgtttgcaattatctattttgcatttgttttccttgtcaaaaaccttttttttctattttttttgttttttttaatttttgttttctattcgtttcaaatgaacctttacactttataagctcagtaagtcattgacttgtccctagactgtcatatgttcctaagtaacctggatcacaggacgagctaatgttcctgtcccgggaacgaagcatctgtttgttcctaagtaacctggatcaccagatgagctaacgttcatgtcctgtgaattttgttccctgatcgagggtcgtgattgatgtatgggatgagcagggtgttgcacctagcacaaggccaatcgtcatagtaaaaaaactagaatcggtgggtgacccgaccgacctctcagttcactagtcttggcttgggcggtcgtagttcacgtatacatttatgttattattcctttctattcacaaggtgaggaatagtatgatggttagggaatgacgtgttggaaatatagtcatatatcggcatattttaatccaaaatattaagacaataataatgcatgaacaatgtgggatgatctagtgataaaatctaacataacaggagcatgcttaagatagaataagcatcatcatcatacaaagaacgcaatagaattgcgactaacaaagatatcaaaaattgaaataacagtaaacgcagaaggttatacctgtgaatgtccctccgctggattgtgaggctgaaggtgtggaagaaccccacggcctcggcccggcgcgccgcgcgtgtggctttccgatccccacctcaaccggtcaatagggagcctccaataactccctatttaagttgagatactcctcttttaattcccaaggtggtattattatccttaacatttattatgggcctttgagatttaatagaataaatcgggcctagcccatttattctaacatgacattgtcaactcgctagccaatcagtagcgattttgctatatatttgtcgacaaattttctcccaaaaatttgacagatgtaattacagtacaatcgtagtgtaattacgctgtaacttgcatgtaattacactgtaactatagtgtaacttgtatgtaactttcaaaaatctctctgtaatatgttatttcggtaaaatggaggttgtgggaacaaatccttatacatatgtgtgtgccgtgattttttttcttcctcagcaaaacaaatcttgtaatagatataatgatttaaaattacatgaaacttacgtacaagttacactgtagttacatgcaagttacagtgtaattacatataagttacagtgtaattacactacgattgtattacaattacatctgtcaaatttttaggagaaaatttatcgccaaatgtataggtggtcccatcagtagtggtttaatgtctggttcacctgaaaaccaactggttctctaaatgcatgtctagcgagttgatttttaggtgaaccagatattaaaccgttactgtttggcagcgagttgacaacgtcattccctaaccatcatgttattgctcaccttgcgagttgactagagcatttgtgcaattattgttcattcatccataatacaaccaagcaggagtggggtttattatcttccgatgacccaacctaaaatatttttgtatttgatttagtgatcatagccccaaaaccccttttgccaaacaccaggtccctcacaaatctatctgtcgactacagaacatcgacaacgaccatcacattgcctcagccagcagacatgttactagcaggataaaggaagaggtggtgaagagaagaggaagggatggagatggaggttctatgttgcctggtcgtgcaagaggcactgactgatagcaaccgagcaggagaacaaaagattgggagctgcttggggaaataagtgaagggggattatgttaacgggccagacaagtccatctgccctagctaacaacacaacgagagaaagggaggagcttggcactagatttgctcgcaccacctcttcttgtgcgagcgtcactcgagttctctggtctcgacgctatgttataccttgccttcttctccaatgtcctctcgttccgatccatcgtccccaagaatgtatatggtcatcgagccacgtccctaactagcatatcctaaataagtagtatacccctgttgtcccatgctttcgaagatgtcgtcccatatttctcgttcctgttcctcaaagcatcaaaccccgcgggagcattagcgactagggttcattccagcaaggataccaaagcaagcgcgcagacgcagaccagaccatttgcgcgcctcgcggtgcagcagcatgcagtgctacctcatctactccctccggctaaaaaaagacaaactctggatttccgtgtctcgtttgactgtccgtcttatatgaaatttttttataattagtattttcattgttgtcagatgataaaacatgattaatactctatgcgtgacttgtctttttaatctttttcatattttttttaaataagataaatggttaaacgttggacataaaaaaccgagggtttactttttttttttgggtacgaagagagtagctgttacgaccacctagcaggctagcagtaacatgtgttgatggtgcgtgcggaatgaacagccgcatgtggcgaaccacgataggacatgacatttcgtttcacgtaccgtacgccgtcggtacgtgcaggtctatcgaccgcgaccgaaaacagccaccagatcgatcgtggtcgtggatcagctcaaccacgtaccagattctctgcccgaccgatcgatcgattggcactacgtgctgttagtactagcctagctagctcgatagctgcaggggcagcgtcacatatgcacgagatgagagacgcgcaagcgtacactccgtgcactgcccagtttccttcttttgatgcaccagggggtccagggccggatcgagctgcacacgcaccaattaacacgtacaggatgccacagcttttgtaccaaattacaatgtagtagcaaggctcaccagccgcggaatgggttaagctcccgtgcggtccccgacctgggcgcgtcgtcggctagagtagcgctgggtacgcgattgcatgggagtactcaactggtcgggtaattggggcatggatgcatgagctgtttcggttggttctgcggttggctgtgacctgtcacgttttgttgctttgcttggacacatccacagcccctgccacgcattaccccacgactatgcgactgatagaccactatagtgtttttactgtttttacagggcatgcagagacctcgtacgtccttggggttacttacgcatattacttttcgtgatactagtattcaaaaattgagaatggatacatctcaagaaaatgagaatgcatcaagcaatggcggagaccccaaatgaaaggggccaactacagagatgaaatcgatcgcttctagagaaaaaaaaaggaaaatgaatcaattacatcagataatcgttcttaagcatgaatgataatgtgtgcctgagagcacaaaacctctgtttccatgtttgattaatacatgatatataatatatgaccgtcatggacatgtgatttttttaatggaacatttaactatttaccatttttaagacgtggcgtgaataatttatcatttatagtttatgacaagtgggtccaggtaaactgttaaacatcacatctaacattggtaaatagttaaatatctttttaatgggtacgcaatgtttaaaattattttgagcaatgagaaaatattccatgatataacaacggaagaatatataaaagaaaatattttcatatcgctaaaagtatatcaaagcctcttatttatattcgtagtactaggatgagactcatcttataataagttgttaaattttatgccggagggagtgaatagtgataaatgtttcaaaaaaaatagtaatatagtcatataggacgcatcattaattgatgctatgcatgtcctaaaatgtcatctgtctaagatccaggcagtactccctccgtcccattttaaacgtagccatgacttttcgtgtccaaatttgatcatccatcattcgaactttttatgattagtaattttagtgttattagatgataaagtacttttatgcataacttatgttttttaatttttttttaaaaaaaattcaaacaagacgaacgatcaaaattagtttgcttggggtcagaccgccaagaatacatttccttatagttagctgccaagaaatctgaatatccctgactctttagacttagcggtatttacatggcggtcggccaacggaataattaaccttaatggttttcaggctatttttgaccgccaaggacattatattttcttgtagtgcacacgaaaacttatgtctgcgtttaaaatacgacggatggagtacttaactagctagcccctcctgcaaagtgcgaacttaatttatcttaacctgtgtatcaaggaggttccacagaatgacatgtaatcgatgcatgcatggaattaatggatattggacccctctatgtcttaaatatatatgaaaatgacgtggagcattgtagtccctaataatatgccctaaatagtactgtgactatgtaatgccgctaacgtactcagggacactgatactcttacactaatttgtctcaagtactgaaacccaacaccaacagtgcatgctaagcgcctaattaagcatctagccccatgcttggcgactggcagagcgttgaggagtgacttcaccagcttttgctgaccatccagagctagccatgacgatcacgaattcgctgatatatcgatctgccagccagtgtggatagatagatctgcatatatactagtcacgcatgctccttggcagggcgccccccagcgtagggcagtgtacagtggctagcgtctgcctacgtacggctgctgctgcgtgcaatcgagcaatgcatcattgcgtcgatctgcacgatgcatgcatgtctccgctcttgtgccagccagcgaatgtaatggacacgtactatacacacaccattgattgatctcgagcttgtatagtacgtcgtgatcggccgatcgaacgaacgcgtgcgaatcgcatgcgcgcgtgatggccaatggatcatcgatcgtatgcatgcatgcaatgcattcgcgtgactgttccatccaacgggctaatcctttctttcttctgttcctactgatgatatgccacttgccacgccaatcaacgcatttcactgtcccagaacaagggttatagtactgttagcgtacgcgttagggccccaagtgcggtgcatacattattaatgaagaccatctgacatgaaggtactcacgctattagatctacagacccacctctgctcggtcatactgacttgtactgagctctccatgcttcaaacagttctgtgtatggtatatagtatgtaagatctgtctaggaggttacaacgacttacaagttgaaaccccccatactcgtatgcgtgctttaatccaatgcgatgctggtgctttcgtacgcaggagagcaaggaccaccacgtgaccggaaccctctgtttcggagcacggacacgagcgattgtaccgagatgtggcgtacgtatacgttcctatcaacatcaccgaaacggacgtagacgaccaaaaaccagaaggcggaagggtgggtgtggatgggccgtcggctagctcgtcgcatgcgcaccgcgtacgcctacgttatcgagtcagcttccacgcacgtacggttccaccacgaacgaggacagcgcggttggtatacgtcggtctaaccatccaccggtccactactagctcgccatgcatgcagctcatctgtctcggcctagaaaccgggccggggcgcgcgccggtgaacctactacttgctggctgccgcagcgcccccgcccgcgcgcgcgcatatgcgtccgttcgcgtggcaccaaagcgcattgattccatcccttgtctcgcacaggccggagggggggccatccgcgccatgcgatgcatgcatgggcgcgcgcgtctgcctccccgcccgcccgctgcgacgtccctccaaaaaaaacggccggccgggcggcacggtgcgcaactgcacatgcccacgctgcatgcgcctgcgccgagagcgcgcagcccggccggcggcgcgtgtcagcgagggagggaggggtgatggtgggtgagcccggcctgcctgcctgcctgcatgcctcgcgcgcgcaagcgcaaaccgcacacacggcaggcaggcaacagagcgccttgttgttggccgccgggaacgagaagcccgtgaacgaccgagcgaggccgcgccctcctgcgcgcgcacagtgacgcccgccgtgccggccgggaggatctgtcgttgcgctgcccgcgcgccggcccgcgcgtttcggacgcttgtgcttgtccacacgttcgtcgctcacgaaaaacgtaccgatgcctagtccaagggctgatgttacttactactactactactacaactgatctcgaagtagccggttctggatacatgtagccgtggaccgtttgcaacgtcagatcgagtgcgtacagcgtagcgcgctatatacagtgtgtacagagtaaccgtgtatcgatccaaggacatgggtagcaggaggagcaatacagagaactgactgtaagatagagtttctttctcttcgcttctatacgcagtacaagtattagagcaagtttaatagtacatccaactacaagctccaatttatttatagctaatttaatagtcgatttgtacaatagttgcttactatactattaatacctggtcccacatgttatatacacatcacgtcttgtaatccgtgctgtagctggctacagatttgtagcccgctgatcttctctcctattttatcactttaaaatatgtttatagctggcttatagcctatacctgctcttatactgtactactattgtgttctaagattggaccatgtggtccaatttgtcaggggaatccatgtgacgagcaacgatctcgaaaaccgcgtcacagagcagtgatgggtacaaatctcgggcagcatagacacgaacaaacttgcgagtgtaggtgtgccatgcactcatgcaggcagccgtaaactttttgggacaggtcagtctcaccaaactttctacgagtactttgccagtttgcctggttgaaacgtcgggattttgtcaatttaaatgcatcgattcgtgtgaaatttaggggttgtttgttccctcccaaacattgccaaaccttcttgccaaacctagccaaatatatggcttataaattgatggacacaccttagacatggtttgactagaaaatggttgtatgacacgtgggcctttaaattagaaaactgtggcatgccacaagtttggaagtgaaacaaacatatgtcttaaaaagtgtggcaaagtttgttaaagtgagggagtgaaccaaactccctccgtctcacttacgagcaactatgagtttccgtggctaattttaatcgtttgttttattttaaaaattataattagtattttttattgttatgacatgatagaacatgaatattactttatatttgacttatgtttttaaattttttaaaaaactttttaaataagacggacgatcaaagttgagcacggaaaattatggctgcacttaaaataggatgaagggagtacaactatgtgtttaatatagtactactagtattccctctatcccataaaaattaatctagtactccctctatactcgtaaaggaagtcgtttaggataatgtttaagtcaaatcttatgaatataaattatgaatatctcttaagttgttgagtttaaaaatgtaaaaattatatgaatagatttgtcttgaaaaatactttcataaaagtatacatataccaattttcaataaataattttatagaaacaagaagtcaaaattgtgttttggagaccgtgccgctgtccaaaacgacctcctttacgagtacggagggagtactggatgtgacacattaatttggacatacctctatttagatccgttgtactagaatatgtcacacccaattctaagttcgttttttatgagacgaagggagtacttagagtgggtttagaattgtttttttcttatttttgtaagaaatgtactcgtaattgtgatgttagttttctaaaaaaactaatgggacctggttttcatatgatcctggtaaaactttataaaaagaactgctcatctcgtttggagtacaaaatcctaaaaatgcaagaaaataaaagcacaagattggaatgtcacggcatttcaaatcccatggaaaaaaatttgtaagaattattcaaagcatgtattccgatggctcatagaaaaaagagtaaattacacgcgaagatgtcatattatcatctagactcgtaaacttgaaaaattgcacattgagatccactatcttgttttaatgatccataagtggtccaaagtgtgtttgactatagccgaacgcctatgtggcgctccacatcttaacgtggtggtaattttgtaattaccccctattgctacaatagtcatcgaaatcccccaaaatattctaaatccctttgcattcccccccccccgccgcgtgcttccatgggagaggcctaagtatcacgaggatgatgtcggcagtcatcggcggtacgagatgattgaggtgttaatttgggttgtgcgacaaacgatgctcgataggcgacggacaacgcaccttcctcgtcgacacgacggttgcgatggacctcaactttaagggagaagattaatcggtgtccctaccgtcgttacctcatcgtttcctgccgcctccgaacagcatcctcatcattgcaaccctagtcgtcaggggaatgcaaagagacgaagggattcggggggatttcgatgactacattagcagtagggggtaagtacaaaattatagcctcgtcgagatgcggaggaggctggatgcaaaatgctgcctacgtggagcgccatgtaggcagccaactctggtcaaacgcgctatggaccggctatgatttattaaaacaagattatggatcttaatgtgtaatttttcaagtttatagatctaagtgatatctttgtttaagtttaagaaccggtcatgtattttactctagaaaaaatatagaaattttgtgatataggttagttaccccatctgtctctaaaatacttagttcctagaatccaaatgcacattttgtaacgagagtaaattactctaatgcctctaattaatagaaaattagtttggtgagttggtagataacggggtattgaaggataaattttcttgattcgtgaaccaatattaagtaataaggtactacgtatgagttagatttattttgaacaaagtttaagctctataaatttattttttttagacgaaaggagtagattagagtgagggtaaagagagaaaaggatattgcatcgatatatcaaaggaaatgaaagccatgaggttggagttcacgtttaaaatctaaagatttgaatcacacttggtattccacataaatttgacaaaccctaaatcctatgatccaaatgatttcactaagaaatttcctatgaattcatatccattatttttcctttaaaaatactataacccaaaggtctcggtcctacggaaattagggagacatcgtgtttgggataggctgatttttcctttactactcaaaaatcagaaactacctaaaattgacagaatctgacctcgggtatccttgtactccctgtcaaaaaaatttccaattctactcccttcgtactaaaatataacaacttcgtattcaaaatttgttccagaatatatataacaatttcttcacctacattctcttcttaacctatcacaatcttctatcattcaaattctataccaactttctcttctcaatcaatcacaactttcttccatttaattctaccatcttttttaatacctgtgtctgagcctaaaactctttatattttaagacggaggtagtatatatgaaaataactcctctctcggtaaaaaaagaactataaatatgaatctacatataggacagcgggagtatatgatggacggaaagaacggcggactgaagctacaagtgcagaaccacaaaaaggatggttaagcacttaagcttatctaatccttcttgctttggaagaactgcctgcttgcgttcagtatataaaaaatttaactctcctgtattaaaaaaaaaaagaacaggcagttctcctgacgatcttcactaaaaaaaagcaataaaagctgaaaagctgggcagattcttgcagaagattatagtactcgtatgatcttgtctgttggagtagtcgctacttgtactggcatgtgcacgcttccatgtttctactcctacaagtttaatactagtactaatatatataccatgtatctactctacgagttcagtactagtatatgtacaactcatcgtgacagtgtgagtagtaagcagtgcgaataatacttgatacacggtgaccgaatgtagtaaagtaaagctagcctagcatgtaattatttttcggaattgctaaaagactgtcccaggttttttttgaggaaaaaaacttttaaatgtaactatagcagtacaaacacgcccaccattattcttaataaacgcacactatacatctaacgagaccatatatgaattgaagtgatttgttctttaaaatttagaccagtacagaccggttttgcaataattacgtacactacaaattttgaaatgaatatgcttatatgcctcaattatttgtctctgtctggttcctgcgacccagtgctcattgtgtctccatagcttggacaaggacaacaatgggtactgtggcaaaagtagcatgagttaattaataggcaaaaagttaatcgcacgagttaagctaagccctgaattttgggcgatgcatgattgattgctctagggcttatggagctatggtcattgctcgcatcactgaagtactgcttcatgttactcatgtggcctccttgtctcctcgtcattccctgtactgttaatccatgtgacattggtgtatatctgttgttcctaccctgattctcgtccttcatctagctggaaatgttataccttaagaataacaaatcacaaagttggattgttaactttcggagactgtctgctagctgcctagctggaccagttcctcaataatttacatattcgggaagataaaaattccatgtgccaacatttctgtcttgttttcaaccttaagatgaacatttcaggtcttgaaacccatctagaaattgggaataaatttttgacagaactttacaaattcaaacaagaactttaggggcaatttcctttgcttcgttgctcacgttgaatatcttttgtcccttgttgcctaggaaggagcccattctacgatattaaacttctgcaaatgtctaaaaaataaaggaatcataaacttcaagctttaatatagtttaatctgaataattacatcaaatgtttcgttttccaacattggcctcttctctttgccagcgtgtatgccattctctgtagtgtgaattgatcaatcttcctcaaattcactacttcttccttgttctctgcagcttcaggttcttaggtgtagttttattttgcttgtttaggacttccttaaagaattgaatgggtaggaaacgctcattctcaaggttaaggctgtgttcgtttgtgtgagatagggtgagaaaacacctcgttttccgtgcgcacgcttcccaaattactaaacggtgtgttttttgtaaaaattttctataggaaagttgctttaaaaaatcatattaatccatttttgaaatttaaaatagtttatactcaattaatcatgcgctaatggctcacctcgttttgcgtatcttcccaatcttttcaatcccctatctctcaaattgtaacatcctgaaaattctcaataataaaaatcactaaaattttgaactttttaaaacttttgcatcatgctggttgttataactgctattgctttccaaaccgtaaatgattacaaagaaagtaaagaaaagaactacatttaagcaatagatataatttaagagagtatattatttatgtttaaccctacaagtatttatgcacaaaagttccaaattgcattcgggggttgaaatttaatagattaaacccctccataaaataaactaacatataaataaattgagctaatgtgttactgcgttaataacggtctcattaggaaattatagaatctttaataaatcttaaatatcggacaatattaaattttgggaaaattcacatttggacacttaatatggtcacccaaatgcttaggagtaatacaaatttaatttataacttttcccaatttataaatcaaccaaagccctaaaagtaggaaaataggaatacttagaaaaatatataataaaaataaaaataagttcaatattaaatttgaatacaaatttcaatggaataacttaggattggtgtatttttacattgtgacaaaattagtggcaacaatatatttttcctaattgcaaagtaccctctaaattcaaaaatagttggctagcactgttcattagcccctaggtgttcgatttggtttctagccatcctagctctctttctccccactgttgcgccgccctagccggcctcgagccccgcccgcaccggcgccgtcgccgtcgcctcgctctgccaccgctgccgcgccgccgcatcatgtcgcgtcgccgtcgccgcgccgtctccaacccgccgtcggctgcgccgcgccgctcgtgtcaccgtcgccgtcacccgcgtcgcgccgagcctcgcaccagtcgcgtcgccgtcgccgtcgcatcagtgcctcgcgccccgtgcgccgctgccgcgccatcgcgtcaccgcgtgtcaccgtcgccgccttgagccccgcgctgccgtgcgccatcacgtcgctctcgagccccgtgtgccatcatgtcgtcctcgagccccgtgcgccgtccgtcgcgtcgactattaagccacccttcccacaccctataaataccccctcccatctcccttcctccccacacaccatgttggctgccatcacaaggccccaagagcccccacgagctcgtccacccctctctgcctcttcttctcccttgtatgcattttctcaaacaccttgtgtgcatgccggcagcttcttctccgctccaccaacgccgccgagcttcgtcgttcctccatctctcggtaagtcctcgctcctatgtcctctcctagttccgtagaaactagagccccctttaatttcgccaattagcaaccgtagccatgccggtccggccaccgttttgccgccggtgagctcgctgtggacaggccatcccggagcccctcctctccatctagccagcaaaatggaaccctcacacgccatagatgctgacgccctcaccaattcggtcggaaaccctccttatcgccttagcacctagctacccgtgcccggccatggcggccttgcagcgccgctcgcccccgcgccgtcctgcgccatgaccgccggcaggtgtgcgccgtgaccgccggcaggtggacgccagagccttgccgctcccttccctggtcgctgtcgggtcaccctcgcccgggcctagccgcgccgtgctctgctcggccgatggctggaggtagaagacgataaagaaagaacgagagagagagagcagtcgggcgcacttgtcaatggttcataggatttgctttagaaaaataatccagtaggaaagcaaatacaatcctaaaccccacatgtcagtcacttggagttttggataaagtttaggaataaaaataatggattaggaacagtacctttttacaatttctcagatttattcaaatttgaatctttaaactagcgtaactctctcattttaactcggatttgagtgaaacttgaacctaaatttatctaaattcataagctttccaatggtatataattcactatttgataaaatacatttataattattaaataattaatactaagataatgcataatagtcaacttaaaaatgtgctaacaaataaaattagtactttacagtaaggtagatgtaagaatatttgtctttaacatgctttgtcaatgtaacaaccacacaaactaattttaaatgatgtctcaaattaatgtataggaagatactagtactattaaatggttgtataattaaaccccatgacttatagattatttaaataataaagttagccttataattaggtaaatcaaacatgaatacagatagatgagtctttaatttatttatgaggaataggtacagaattgttatgatagaaccacccaaataaggttgagtcggttagcatccaataattactcaaagagtaaaatcacttgccaacccacttaaatcacatatattgtacaatccatttaaaatcatacataataacaataacctacctttagcatatattaaaccaaggagtatatgacaaacatgtatggtggataaatactagttataaatcttgacctcatataattatagttcaactgtaagttaggattgttcattaagggataatctgtaactataatatgattaacctaaacaactctaacatacaaagcatggataattattaaccttttctaatttatcgtgacaagtaaaatattttcataattaaagcaaagcctccatcaataaaataataatacaaatggttccctgcgattaattgcttgatcccaaatccatctaacaacagaacctctggtatgtaaccgtgctatttagatagatgcatatatagccataatccttccatagccatttgatagaataaatcgccgattagccaaatatatatgtatcccataaatgctatgttggttaactcctaaatcgaccacgatgacaatagaaagattaagaagccttagccctagcatgattgaaatccattagcaaacacgaatagtatgagcaaccctaggatcgaccccaacaattatcttttgcttgtgcatatttgcttgttgtttgaatattggtttttctcgcgtattatagaccttgtgtatcggttagtcgtgaggcaacgtctacaacttccaggaggtgaaggttgatcaagattatatcaataataagaattatcctgagcaggcaagtcatcactattccttgaacatgttgatcccaattgcgaaaattattttgtttacaaataaaattgcatgcaatgatgaacatcctacttgtgattatgccatgccttgattattgtttacccttattcccttgtaaccatgattacgtatgagtccctagtcaactatgacaaatgcttagaaatgctactctagaatcatgcattctcatatttatcaaatgctatatgcttgggcaattacctttgggaaggtattgagatgcggcatgtggagacataagcgccacattgccatgatgttgatgacatgatttgtgaaaggagaaataaaattaaacaactgttttcgactggggcggacggaggatttgggtggtatccggaaaaggctagtatcgtccccggtcaattaaggaccgagccatgaagttaagcatgaaactacccccgtacaaccgcacttctcgtatgggtatagacctagcggagtagatagctgagtggaatccatgcatagtggtttcttgatgtgtgaggcaggggctctacggtggggcagccattggtagaaccgcgaggtgggtgtctacagtggtgtcgccatcggtaggactgccatgtgagaatttaaacataattataacttaatgcatgtgtgagtctttccttcccgggtgcgctagaactcctctcactgctagaaaccgtgtacgcctagagtgcatgaggatgtaaagttcatggagcgggtattgccaatgtgaggttatcgaaaagctttgccgtgacgcgtctcatgtgttgggacgggctcatgtgttgggcagtcgcgaagtgcgggtaaagtgtacatccactgcagtatgagtaaaccaaatctattcgaatagccgtgctcgcggttattgagcaccgggacgtgtattacacttggctagactctaaattcttaacttgtgtgggatgggttattgcatgatgattttatgctgatggagccacttcctgagaggcgggaaggtggacgtcctcagaaaaccatgacgattcaatggcgggaagctatccatgggatcacaatggatggtggacagaaccatcgttatttaatgtgaacactggtattaaaacttgatcagtctatgctaggtctcaggcttgtgaaaagatttgcaaagcttgctttacgcaaaagaacctggagcccttccttgaaataccctctatcatatgcattgttgctgtggtggcttgctgagtacggttggtactcacccttgctatttatatatcttttaggagagtgttgaagagaagcccttgtcggtacgcttgcgtatccaacaagatgattggagtgcggtcttgttctaggtctcgttccccagtggactgcctgtggcatgttaaccgggcccttatattattttgtcttccgctgttgttctctgatagttgttggcccacctggctctaatgtaagtatttaactcttttagcctgaattcattcgtgatatgttgtgattcaactatgtatgtgtgtaccaactactgatccagggattggtacggataaacacagatgatttccgatttccaaaatcgggggtctacacaaactcaccctaagtccactttggctgtgtttagttccttccaaagttggaagtttgggttgaaattggtactatgtgactgaaaagttgtgtgcgtatgataggttgatgtgatggaaaaagttggaagtttggatccaaagtttgggtctaaacacagcctttattctaaacatagtgaaagaatgatttaccctccttacatgtgaaacaaaccatttaacacctccccccctcctctttccaactcaaaccaggataatatcaatcctacttgaaacacgttataaaaatatagtcaaacccacatgtcatccctatccatcttcttcctcttttcccatctccttcgccatcatagtccaacgagctaggtccacttgtcatcacctctctagggcgcccctgtctccttgcagaaacactattcaaacaataccaacgagagagagcaagagatatgagagaaagggtcattcctcaaggcgacaactttgtgagaggatgtcgtagcgaagactcgggaatgatgagatggcagtggactggatgacagaggagcttgccttgaactagctgttgaatagtcccacattggttgtggaagggtaaggatcctaatatataagtgggggagcccttcgcctcaataactagcttttggggtgggaaagaccctttacgatcctacactagctcccctattgagctctctcagtggtaccgagctcgaacaaccaccacggactcctccaagctgcaaggccatttgccacaaccaccatgtaccatagttattaagaccggacaggataatgaactggtcgagctctcggttcacctgtttgatggtccgaccaggttaggccggtccaaccgcggttcgatgtataatatgacgtaaatgtctcgtaccaacataagtgaatagatggagggttggctagcgcgtgctgctctcagccatgtgaccgaaggtcgaatccccactcccgcaccctcttctagcgatttttggtggggtttgctcagtgggcctcgcctcagcccatcaacaaaagccttacccggtctgaccactccagttcaaagcccggtttatataaaaaccgccggttcaattgcacacccgatcttttaagaggaccggacctgtcgaggctgaggttccggtttttcccggtcgggtcctaataactatgccatgtactagtccgagttgcaaggccaccatttgtaggacccccggcaaccaccaccatgggactacttcggagctccgagctgcctctaggagagcgtcatcgctatgggaagagatggtgctgccatataatttccctcctctctcaccatcctacttcccatctagctcatcatgtcagcaccaccttgcagtcatgggagtggaggttgcgaatgtgacgaaggttgttggaggagaggggagaaaaataaaaagggaggaagaagatgaggagtggttaaatggtggatctcatgccatattggacaccacataattccaaggccactgtgtgttgagtaaaggggagtaatttgtctagttttaagagttagtggatgttaaatgtccggtttcatagttgaggaggttagtcaagcttaacgcttttccttatagcctttacacctccatacttaggccccctttgaattggaggaaaaatggagaaaaaacaaaggaattgaaatcctacactattcatgcctttgattcgtaggaacaagaaaaggaaaaacgtaggaaactttcctattcctacaattctagagcaaaaacgtaggaaagttaacatccactctaacctcttggaaaactttccttaagtctatctctctcatttgattcctgcattttttctgcggtctaatcaaacagtcattcctatatttttcccgtgttttgcaatcctctgttttacacttgcattcctaccaaaatcctgtgtttttcctattcctccgtttttcaatcccgcgattcaaaggggcccttagagtgtggatggtaaggggctttatcaaacttgatgtagcaagaacacacccgacctaagagtcgataatcttgtctaacccgatcctgatcgccttcatgagcacaaaataaatgcctatgatgtgcccatcgagaacctaatttccaatgagtttttattgggtattccaaaccattaatagtatatccatgctcacataattaaaccaaactgacatttgaccacaagctagcaaatattaagtcatcaacattccaaaccaaagaatgcaatttacaacattctaaataagagttcccaaatcagcattaaacacaagacggaaacacatatatcaggtcagagcaaggattatccatgggcataaaacaatacccatgattgcccgtcaggatctgtcatacccaaggttagaaagctactccgtttacccatttaggttcgatttgaatcgtagaaataaaaaaaaaacatagaaatagaaaaaatataggattctgacatgaatgtaagtataaaacagagaatttgcaaaacacaggaaatacatagaaatgatcgtttgattggatcatatgaaaaacaatggaatcggatgagagagatagactcaaaggaaatttttgaagagctttgagttcttgctaagtttcctctaaaatctctatagtattgtccattacatagaaatttcaaatgattagataagattcaattcttcgatttaaaggtattcatataatttttctttagtattgaaattctccaaaatttatatgtttttcttccaaattaaatggaccttacgattgtttccataactttgagacaagttgctatatgtgtttgctctaatgaaacagcaaaccctacaattaggcgagttgggatcattctgacttttcagcccatcctcccttctgacagctcgattacgcaacgaagaagagcccactcagctttctgatcatttttttgcctgttctactggatgcaggccgagagagagagagagagagacctggtgccactgaacgaagcacagctatagttttgctgctctagctctccctctctctaccgcttgcatagtttcattgcatggctgtctgggtggccgcacatcccaccactgttgctgtgcctaaaccttatcttttccccatataaccagctcacaccgctagagagaaagaaacatacgcatcccaccaacgcgacgagctcagaatctcagaagtcagcagcagcaaagaggcgataagtagccgcggctcaccgttcgttgcccaaaaccacccaaaagcgtagcgacacacgagaagccaccagccaacgtagtacgcgccgagagctgaggccatccacgacacacgaacatgagcacactagtagacgcgctgtgcgctccctgcagcgacaccgcgctcatctacgacaccttcaacgcctccgccgccgcgagcttcctcttcgacaatgccgccgccttctgcgacgctgacatcctcggcgccacggcgacaggggagaaggaggcgacgtcgtcggccgcggccgcggccgcggaagccgccccgccgaggaagaagcggcggcggcgcgcgaagagctgcaagtcgcgggaggagacggagacccagcggatgacgcacatcgccgtggagcgcaaccgccggcgccagatgaacgagtacctcgccatcctccggtcgctcatgccggagccctacgtccagagggtacgtcgtactacgcgcgccggcacacgtctctctcgccctctctgttttggttttttttagcaaaccgacatcgcttcgtgtcaagtgtttctaccctcttttgttctgtatatctgcgttgctcccatttgtcaaagagcaagaaagcgatgtcggagcaaccggcgaggagaacggcgatgagagaatgtttggccgaaagagactcccccgccatggcgccattgtccgccgttactcatggcgtatcgtctctttactgctcaatctcttttcatgaacagaagcatccattctttgcacagaaaccttctgcccattaatgtgtctcccctatcattaattcactcgtacacagagagagttgcctggatgggcctgtcatgtcaaaattaatgcgttcttgatcatttttaaatgttgtgtagggcgaccaggcgtccattgtgggaggcgcaatcgagttcgtgaaggagctcgagcagcagctgcagtcgcttgaggcgcagaagcgaacgctgctccctcaccacaaggcgagatgcgacgacgcaacgccgatgcataacgccagcggcagcaacgtcggggccggcggctgcatggagcccacgacgacaacgagcaactgcagcagcagcgtcaccgaggacgcgccgtccgccgacgcgcccccgttcgcgcagttcttcgcgtacccgcagtacgtgtggtgccactcgccgcgcgactccaccaccaccaccaccgcggcgtctgcgtcggcgtcggcttcggcgtcgtcgtcgtcgccggccacggtggcggcggcgctccagtcggagcaccgctccgggttggccgacatcgaggtgagcctggtcgagacgcacgccagcgtccgtgtcatgtcaccgcggcggccagggcagctgctcaagatgatcgccggcctgcaggccctccggctcaccgtgctgcacctcaacgtcaccacgctggactcccttgtgctctacaccctcagcgtcaaggtacgcctacgcctatcgcctgcgtctgcagccgtgcactgatttcagttcttttttcaacaaaagtgcctcaattttcggccactgcatttcacacgcatttcgcgctgaaacgcgcaccgatgcagtagctagccaggcgctcaaaccgagcgataccaccagcacaaacgtttgtgcgtgtctccatgcatggtttgggaatcatatgaggtcacttcaaccgagttaattaatcggagtaatctgggacgattattagagacggtgtttgattggtatagcgtctgaaaagaaaacgtgtcagatattctcctgcctgcactgcacagcacaggcataggtcatcgcatcaaggacgcagtcgtgcaggcccccaaacagtataatgaacagaaacaagagatgagcagagatggagatcgcttcacccatcggctttcgatcaagcatcattgttcgagacgcatcaaaatttctcagaatttgatcgaatccgatggacctgactaggagcctgagtgcctggccacctgagtcctttcctgcttccccttctcgcttgttgttcgcttttgaccggatactccgtaggagtatttcagtaggagtaggcaggtcgggcccctgcagccaaaggacttgtcaagtccaaacggtgagtagcgcacagtactactagtggtctggtagtcctagtaagcactggcctaagctgtgcgtagtgtgacgcttcacgaaaaagctactgcatcagtcagtccagattgtgtaagaaaaacgctgccacggagaatcctttctgctgagctgagccatgctatagatttcgactggcatagagaactgagcagaaaaggctatagctacagtaggcacaagtatagcgctggtgttcagccatgacagtgtgtgacagttccccgatggaatctgtgtgggagtagtgctaatctacggcattttttttgcgacttagtggcagattccttcgctccctaaccggccattgcacatgcacgcaatctcattagttctcgtctaatcctaatcttgtctttgcgtggccgtgtgctgcacaggtggaggaaggatgcagcctgacgacggtggacgacatcgcggcggcggtgcaccacgtgctctgcatcgtcgacgcggaggcggccgcctcggagcatctcctcgcggcggggcaactggccacgacggcgacggcggtggcgaagagagaactcgcgacgtacatgtactgagccgctccaagtgccttacatgtcgtcgtttgtgtggtcgcgtgtactgtatgccgcgctcccgtttttctcccctttttaggctcgtcacgtttttgctgtgtagtggcccggcaggttagatctagttctagttgtactagtagatgcaaaatgctatgtgtccagtagtcccagcctctcgacgagggcgtacttgtctgtttctcgttctgaaaacagaatgttgtattgctgtacctgtacagtatcctgcctcgcctttctgtaataagagcgactagcgagtagcgacattggaaggaacagttcgagattcgtattatccgaacagggccttatgagggtactagcttacaatgggccatgtgagttaccactgcttcatggcaagggcgggctttagcctactcaaagtccatcaaccgtgtgatttgctcgatttgtgggccgtgataaggccgaaggccagcttgctgccaaatctccaaccagccccgccgaccaccaggagcaaatcaacccgtttgacggtttgaaaagtggtctatactgatatggcatgttgatttggtccacctgtgatgaatgaactttgtatggttatatttgtagtaccacatctatatctatacctaatataaatattcggattttttctgtcgtcacatccttttcaccagcgatttttcgtcccgcgttatccgatttcttcccaccgcacacaagtatcacgcacaaaaaataccccacaccgattcctacttcaatttgccacattaagcccacaagcccaaattaagatagatgaggcacttcaatatttaagattggaaacagtaaaattagagaaaaaaaaataaacgaaattgaaggggaaaaaaagcctaaagtaaacaacaaaatcaaaattgaaatccaataaaacacgcatggattcccagctgattcgtctcaaattcacctcatcgggcagccaattcatcacaaattcaatcacaagaaaagagtaaataaaataaaagagagggaaaaaaagatcaaacccaataaaccacccacagattcgcagtcgattcatcacagactcgccttgtcgggcaaccgattcatcacagattcaatcacaacaaaggggaaaatcaaaatcaaaaagaggaaaaaactgcccaaaaaaaaggaggggatggtggagcctcagcgagcccaccaccgccacccgcgaccgctctcgtcgccgtcgtgttcaccgctgcagcactgtcacaccctgaagttctcctcccaagcctaaaatttaatttataaatgaccctaagaaaatgctggtgcaaatcaagagaaaaccctaagaaaataatacaaataataatcgaatctggcatatggaatttttcttgagttctacatgtagaaattcattaacaggattttagtggaattttcagagccctagaaataaatttaaccaattaaaattgagcaagcaatattttaattccagggaaaatccttttcttcctttttctttttctttttccccttttcttttcgggtgggccgccggcccattctccttcctcccctcccctccactgggtcggccgaaggccaaagcccagctaggtcggccgcctccctcctcccacccgggacgccgacaggtgggccccacctgtcgggcccgtctcctacctcgcgcccgcgccgccgcgcccgcaaccgccgtcgcgcccacgcctccgcctcctccgggccacgtcggccacgcccgcgcgtgcgccgcacctcccgcgcccacttccccctctctctcgtccgctcccgcgcccgagatggccgggattcgattttcgaatcccgcctctctctcctctcccactccccgcgttggccggcggaatcttgcccctaccggccacgtccgggactcccctcccctatttaagcttcccgtcgccccctctcgctttttccctatttcgccgaactccctcgtgctccccatcgctcccgcgccgtgaaaccacccgccgccgccgcttccgttactccggtcgccgctagccgccgctagggtcgccgccgcaccgcgccgtcgccgccgtcgggttcgcgaggccaaactccacctcgtccgccccttccccgtcgggattcgtcgccggaattcgcatcccctcgcgctccggtgagttctacctctaccgccgccttcggccatggatgccggccgccgtggttcatctccctctctctaatatctctctcttccttccttagggcaccccgaagcccgtccgccggttgccgtcgtcctcccgtggctcgccgtcgccgttcgccgtcgtcttcctccgcgccggccaccctcggtgaggcgtcctctcccctctactcccctccctctccctcctagtaccgcgccgccgcttcaagtcatgcgccgtcgccttcggccgccgccgccgcctcccgtgccgccggtcgccgtcgccgctagccctggccggccggccggctttgatgccgagccgagcccggcggccgcctctatcgccaccgcccgatcggctcggggccgatctgggccgtcggtcccgtggactggcggtggaccacccacgtggtcccggtccacggtggaccggccccccctttgagccgctgaccagtgggacccgcctgtcggcgccgcccccctgatgacgtcagccctgggagttattgcgcaataaattatttaaggactttttgttatagtaataaacacagtgaatcttctaaaattcataactaattcatccgagctccgtttaagcccattcaagtctcagtaaatcaagaaaaatgtgtagaatccattaaaaatggttttgttctctgtttcagtagtcttatagtctgtttgcaatgtttgccttgtatgtcgctagattccggttcttccgacgctccgatgtacttcgaaatagtcgccgaggttcctccagcagcagagcaaggcaagtcatgcttgtcacttgatcatgttgatcctatattgcaaatgttctaatgttttctttcaaatactgcatttgttttgcaatatcactatgggatgtttacctattgttacagccatgctattttggtaccttgctcctttgttagctcgggttataacatgaatagaccttggactaggagttgcttagccatgcttagttcaactagcacacaatggggaaatctcatttaaaatatagactgtaggttcatatgataatgttggtttagtaccaccgctttggtgttggttaattaaaatgaatcacatggtgggctgtgggtgcatggttttgcttgttgcacccagagcaattaaggaccggttcgcgggaaaccctggaagaatttatcgtgcttaccacaagccagcgtgggcaacggctgggcttgtagtgtagcttttctctagctgacgcatccaggcaagggtgggcgtgatggagtttggatgggccctgcgacggcctatgcggcttccggattcacctaggcacgtgaggggactgcccgtcgcccgctgaggacgggggtgaaacctgaggtgtgatgtgcttggctagagggggttatgcgaagggtcttgtcacgacctctttccggtatgtcgtggtggcatgtcggcgcacggaaacttgtcgtggggctgtgtcttgtgggtacagttgtacacctctgatcagagtaaaactattcgaatagccgtgcccgcggttatgggcggtcaaccagattcaccgtgatttgtctcaccctagtttagtcttttgaaattggatagtataggtggacgattaggcctgtcgcaacatggtatagcgttggacggtggatgattaatattgattaattattacgactgttttcttctttaaatttctgtttataaatgctcgctttatgcaaatgaaccacgctagctctcctttgataattccctgcatcatacccctattccggtatgacttgctgagtacagtggatagtactcagtcttgctctatttttcccaaccccagagtacgagtatgtgtcagatggaggtttctccgaggagtaggcttcgtccgtgccgtcgaggatgcctgtggagtggtgttcccgctgcagttctagtcaaggcttagctcctgttgtctttcgttttttccgctgcatttttgtaagacttttataatgtttgtaagacgtggatctgtatgtcaactttgtcgtttatgtaccccggccggtcctggacggggattttaatgcacattctgcttggaattctattcgggaatttctgggtgtgacaagttggtatcagagccgaccttgatcgtaagccaaatgggaaaaacctaagagccctctgaatccttttcattccatatgttctttgtaattggatttgttccgggaaaattgggatctgttcttgtggttcaagggaaaaatcttggtcgctcgtttaagtgagatttgtcaaaacaagtcagtctagggttttagtaaaattattgagatttattcgtcagtcagttgggatttgatgggtgaaatgcattaggtcccagctcaggaatatgggttgcaaggtatttatgctcttattgttattattagtatgtatctaatttccccatcattttatcgttatgtaagtctgtcttatttattcgccctcatgcaaaatgatctatacataaaatttcgctcttattcgatactcttatttgagtcctttattactttatttaaattggatttgagcatgcattgatcctactcctttgtcttctctagatggccggccacccacccaaccaccacggagaaggcatgattgactttgtggcagagttagcacgtatgacgctggtggtgggctaccccaacgcgccggagtacacgactgttccaccgctcagtggcgagcttccccaccgtgtccgcttggaggtccatggctacgtggggacttgcctcgctaacatggtggttgaggcgtccggaggcacagcagatcacgcctgtcaggaggcagcatacctgatgatggccagactacgggagtgccacaactacatcttccatgacacggcgtatcgatttcaccctcgtcgagccagcggtgatgatgtcagtaccttccgtccaatagccggcgagaacgacaccacctttgatcacatgtgcgccgtgatgagggggatggacaggatgcacttggacctgcacaagacgtccaaggccttgaatgatgggaagctcatgaggatcgtcgttctaaaggacgagatagcgcgcttgaagagggagaatgctcagttaaagggtcttcccgcgccaggaggagtccggatccacactacgccccgcaagtcgacaacggcacccgtgcgcatccagcttgcgcccaggaacccacctccgcccgcagttcccgcagcacctccagttccgcccgcagctccagcagttcccgcagctccagcgccagctccagctcatgttcccgtgtcagctcctgcatccgctctctccttcgcgcctgcaacagccgtcaggggccccgccagtggcaatggaggttggttgccagctactcccagtggcagtcgcgacctcagcagcagcagctccagtggctcagagctgggtagcggcgagacttatctgccaggctccaggagtcgctcagagggacgtggtgacgagcaggaggacgcctttgactccaccgaccgcaggagccgttccgagcattaggctcgttttccattagcttatcgactgtctagcttttgcttgttagtttgtgtgtttaggttgcttgcttggggtcagtcgacggtcgatatcatgtgcctatgatatggctgtctcaataaggatttttgcttgctgtttcaagtgttttaattcagatcagaacaattgcagtttaaatttctatataataaagcttagttcctgagtatctgtttttctccgtttccccgtctactcttcctccagatggtctacaccaggactggcacccgcacgacaggtgagggcagcaacggcgaagaacgcgctgatggtgtgcatcccaacagtgattccggcaatggtccgccaccacttcccaagaatccgacgctagcccaagtaatggcacatcagactcagatgatggcagccatgatgcagcagatgcagcagcagcaccagcagatgcaccagaggatgctgcatgtcacgctctaaagttcccctttccagctttaaaatttgtaaaatgaatcgtccgaagaaattgttctttttaacctagagatgaatccctaattaataaatgcaaataataatcagaatcgacatgtggaatttttcttggattcgacatgtcaaaatatgataacatgatttttagtggaattttcagagccttggaaataattttaaccaattaaaatgagcaaagggcaatattaaatccctggaaaaatcctttcttctttttctttttctttttcctcctttttcctctcttcttgggccgtcggcccagtctattcgcctcccgcgccggccttccctcggctgggccggcccaagctgactcctccctcctccctaacccctccgggtcaccgacaggtggggcccacctgtcggccccttcttccaccttccgccgccgctccccaagccggcaaccgccgagccgcccacgccgcccgcctgccccgccttccacgccccactccgcgccccgcgcccacgtcgccgcccaccatccccactcctcccactcgcgcgtgcaccccgcaacggagggattcgaattcgaatctctctctctctctctccattccccacgtcggcgagaaatccggccgcctcccggcctcgtccgcccctctcgagcccatataaaccatccctccactcccctccaccttttcctctttccaccgctccctcccgtgccctctatcgctcccgcgccgctacaccggccgccgccgccttttccactcctccgggcaccgctcgccgccgctggagccgccgctgagccaatccgccgccgccattagcttcgccaccgccaaagctaccccggccgccgcatccccatccaatcccgtcgtcggggcccgcttctccccgcgcgccggtgagtaccaccatagccgccgccgtcggccatggctctcgctcgtcatggacaccctctttccctctaacctctcacacttcctctcttagcgtgtcccggagctcggccgccgttcgccgtcgccctccggttgctcaccgtcgccgtttgccatcttctcctcccgcgccagccgaaccccggtgagaactccctccccttctcttcctcccgcgcgcgccgccgctccccgcatgcgcgtcgccgcgatgcaccgtcgccgcgatgcaccgtcgcccgcgtcgccggccgccgccgtcttctcgccggccgccgccgtcggtggccgcttgccgccgccgccctcgccataaccggccggccggcttgaagccgagccgagccaggccgccttcctccttcccccaggagccgtcgcccggagggccccgcctgccagtacccctccctcccccttgagccgctgaccagtggggcccgcatgtcggcgccgccccaccccttgctgacgtcagccctgggatgaattattgcgcaataaatacattaaggctttttctttattagtaaaaacacagataatcttctaaaaatcataactaattcatccgagctccgattaagtccattcaagtctcagtaaattcataaaaatgtatagaatccattaaaaatggttttgtttcctgtttcagtagtcttatagcatgttttgcttgtgtgctttgtttgtcgcgtagatttcgcccgtttcgtcgattcgcggtttctcgaagacgttgctctggttccatcagtgcgagagcaaggcaagtcatatattataattgatcatattgtacccaatttacaaatgtcccgcatttctattaaatattgcattgttttacaatatcatgtgggatgggtcgtattactcagctatatgttgtttcccttacgccattgataacttgggtattaaaatgactagatgttggtttaggagatgcttagccatgcttagttcaactagtgcacaaaaggggatcacattaaaacatagactttgattattggcaatagctttggattagtgccaccgcaatggtgttggttaattaaaatacactacatggtgggctgtgggtgcatggttttgctagtcgtgcccatggcgattaaggaccggttcgcgggatgccctggaagaacttatcgtacttaccaaaagccagcgtgggcaacggctgggcttgtagtgtagcttttctctagccgacgtacctaggcgagggtgggcgtgatggagttgggtcggccggggtgtccggttgatcggcttccggattcaccgtggcacgaaaggggggctgcccgttgcctgctggggacgggggcgaaccctaaggtgtggtgcaatcggttagagagggttatgcgaagggtcctgtcacggcctctttccggtatgtcgtggtggcatgtcggcgcacgggaacgtgtcgtggggctgtgtcttgtgggtacagttgtacacctctgatcagagtaaaactattcgaatagacgtgcccgcggttatgggcggtcgaccagattcaccgtgattagtctcacccctagtttagcttaatgaactggtgtagtttaagtggttggttgggcctgttgcaacgtggtgtagcgttggacagtgattggttaatactgcttaattgctactactgttttactgcttttaacttctgcttttaaatgctagctttatgcaaaagaacctttagcccccttggatatatcctgcatcatacctcctcttccggtacgacttgctgagtacagtgggtagtactcagtcttgctcttttcccccacaccagagttgaagttcttctcagttggagatgtctcgaagaggttggtttcatcgctgccgtcaagggttgcctgtggaatggaatcgcccactgcaggagtcaagtcttcaggcttagctcgcttttatcttttttcgctgcatttgtaatcttttatatttttgtaagacgtggatctgtatgtcaacaattgtcgtttgtgtaccctggctggtcctggacaggggtttaatacacattcagcttagaaattctggttcgtgaatttctgggcgtgacactgcagcacgccgaacagcagcaccagcagtttggtccccctccccctcagtccaagttgccagagtttctacgtatcaggccacccactttctctagtaccaccaaccccatggaggcaaatgactggctccatgccatagagaagaagccgaatctcctgcagtgcaatgatcaggagaaggttgctttcgccacacaccagcttcaaggtcctgcgtcagcttggtgggacaatcacatggccacccgcccgccaggcactgaagtcacttgggcggagttctgtcgtagcttcaggaaagcgcaggtgccagacggggtcgtggcacaaaagaagagggaattccgggcactccaccagggcaacaggacagtgacggagtatctccatgattcaatcgcctcgcgtgatatgcaccggaggatgtccgtactgacgccgagaagcaggagaaattcctagcaggtctggatgatgagctaaccaaccagttgatatctggagattacgccgactttgagaggttggttgacaaggcaatccgtcaggaggatcagcgcaacaaaatggaaaggaagaggaaggcggcgcagttccggtccaaccaagggagccaccagcgaccgcgcttcactcccggacagcagggtagacctaccaccctgatcgtccgccagcaccgccctttcaatgccagcaacttccatcagggcgccagtggctgtcagaaccaccatggcggtcagcccaaccgcagtgcagctccgtgcccaccaatggcactagcacagtcagctacgtccgcgcaagctaagaaggagactgggacaaagccagggtcctgcttcaactgtggcgagcttggccacttcgctgacaaatgcccgaagcccaggcgtgccgggccaaggtttgtctaggcttgtgtcaaccacgcgtctgcagaggaggcgcaagcagcaccagaggtcgtactgggtacatttcctgttaactcaatccctgcaatagtactttttgattctggtgcaacgcgttctttcatttcaaagaaatttgtggggatgcatgggttaaggaaagaagagcttaatacaccaatgagggttcataccccgggaaatagttcaacctcggtcagttttagcccttcagtgctaatagaaatccaaagatcaccatttctagccaatctcattcttcttgaatccaaagacctagatgtcattcttgggatggattggctgaccaaattcaagggagtcattgattgtgtgaatcgcacagtcaccttgaccaacgagaagggagaaaccgtagtgtacaaatcactagtctcaccaaagcaaggggtctccttgaatcagattgaggcggaaatcccagtggtcaccgaggagaagaattcgaggaaattggaagagattcccatagtttgcgagtacccagaagtctttcctgaagacctcactaccatgccacccaagcgagagattgaattccggattgatttggcaccgggaaccgcgcccatttacaagaggccgtacaggatggcggccaacgaactagtagaggtcaagaaacaggttgatgagcagctgcagaaagggtacatttgaccaagtacttcgcattggggtgctccggtcatttttgtggagaaaaaggataagacgaagaggatgtgcgttgattatcgcgcactcaacgaggtcacaatcaagaataaatatcctttaccgcggatcgatgatttgtttgatcaactgaagggagctaaggtgttctctaagatagacctgcgatcaggctatcaccaattaagaatccgggaagaggatattccaaagatggctttcaccactcggtacgggctgtatgagtgcacagttatgtctttcggacttaccaatgcacccgcattcttcatgaatctgatgaacaaagtgttcatggaatttctcgataagttcgttgtggtcttcatcaacgacatacttatctattcaaagtctgaaaaagaacatgagcagcatctccgtctggtgctctagaagttgaaggagctccagttatacgccaagttcagcaagtgtgatttttggttgacggaagtcaaatttctaggccatgttattacagctcagggtgtggcaatcgacccatcaaacgtggagtcagttaccaaatggaccccaccgaagaccgtgtcgcagatttgaagttttcttggacttgcaggttattaccgccgattcatcgagaacttctccaggatcgcccgacccatgacttagttgcttaagaaagatgagaagtttaaatggacagctgagtgcgataagagctttgaggagttcaagaagaaattagtatccgcaccagttttgattctgcccgaccagatgaaagacttccaagtctattgcgacgcatcccgccacgggcttgggtgtgttctaatgcaggagggcagagtggttgcgtatgcctcgcgacagttgcgtctacacgaagggaattacccaacccatgatctagaattggcagcagtggttcatgctttgaagatctggaggtactatctgattggcaaccgctgtgaagtatatacggaccacaaaagtctgaaatatatcttcacccaaccggacctaaatctccaacaacgaagatggttggaactaatcaaagattatgacatgagcattcactaccacccggggaaagccaatgtggtggcagacgcattaagcaggaagagttactgcactgccctatgcatcgagggcatgtgtgaggaattgcagtaggagtttgagcatctcaacgtgggaattgttgaacacgggttcgtagccgctctggaagcacggcctacgctcgtcgatcaagttagagccgctcaagtgaatgatcctgaaatagcagagctgaaaaagaacatgagtcggaaaggctcgggatttccttgaggatgagcatggcacaaactggatggggggaaagattgtgtgtacctgacgacaaggaactgaaggatatgatactcaccgaggctcatcagacacagtgttccattcacccaggcagcaccaagatgtaccaagacctcaaagaaaagttttggtgggccagcatgaggagagaaatagctgaattcgtcgcactctgcgatgtttgccagcgagtgaaggtagagcatcaaaggccagcaggtttactccaacctcttcaaatcccggaatggaaatgggaggaaattggaatggattgtataacaggactgccccggacatcatcaggtcacgattcaatctgggtagtcgtggatcgactcaccaaggttgctcacttcataccagtgcataccacctatacgggaaagaaattggcagagttgtacctggcaaggatcatgtgtttgcatggggtacccaagaagattgtatctgatcgagagagtcagttcacctcaaaattctggcagaagctgcaggaagaattggggacccgtttaaatttcagcacggcctatcacccgcaaactgatggtcagaccgagtgagtcaatcaaatcttggaagatatgttgagagcttgcgctcttgattttggtggagcttgggacaaaagcttgccatatgcggaattctcgtacaacaacagctaccaagccagtctacagatggtaccgtttgaagctttatactgccggaagtgccgcacaccactcttctgggatcagacaggcgagcgtcaactgttcgggacagaggtattagcggaagcagaagagaaagtcagaaccatcagggaaaggttgaggattgccctgtctcgacagaagagctacacggataaccgccgaagggagctcacttttgaagcaggggattacgtgtatcttcgtgtcactccgctccggggagtacaccgttttcagacgaaaggcaagttggcaccacgcttcgtgggactatacaaaatcttggaacgaaggggggaagttgcttatcagctagaacttccatccaatatgattggcatccacgacgtgttccacgtgtcccaattaaagaagtgcttaagagtacccgaagaacaagctgattcggagcatattgatatccaggaggacctgacatatgtggagaagccggttcgtatacttgataccagcgaaagaagaaccagaaacaaggtcaccaggttttgccgagttcagtggagtcaccattcagaggaggaagcaacctgggaaagggaagatgagttgaaagccgcccatccgcacctcttcgccagctcctccgaatctcagggccgagattccgtttaaggggggtaggtttgtcacaccctgaagttctcctcccaagcctaaaatttaatttataaatgacccaaagaaaatgccggtgcaaatcaagagaaaaccctaagaaagtaatacaaataataatcgaatctggcatgtggaatttttcttgagttctacatgtagaaattcattaacaggatttttagtggaattttcagagccctagaaataaatttaaccaattaaaattgagcaagcaatattttaattccagggaaaatccttttcttcctttttctttttctttttcccccttttcttttcaggtgggccgccggcccattctccttcctcccctgtcacaccctgaagtttcccccattttcttgctttaaaaattggttaaataaattgcccgaagaaattatcttaattaacctagagctaaatccctagttaataaatgcaattaataatcagaaatagcgtggtggaatttttcttgagttccccatgctccaatgcattaacaagatttttagtggaattttcagagccttggaaataattttaaccaattaaaaatcaccaaagtgcaattttaaatcccaggaaaaatcctttcttctttttctttttcttttccttcttttttctctattgggccgtcggcccactccctcccacgctcggcctccttcctttgggccggcccgttcccctttcccctctctccgggacgctgacaggtggggcccacctgtcaggtcgtccccttcctccagccgctcgccccacgacggcaaccgccgccgaaaccgtccgcgccgccgccttctccgctccacgccgcgcccccactccgcgtccccacgtcgccgccctccccgccattcccgcccgcccgcacgcacgcccgcaaatgggcgggattcaatttgaatcccccccactctctctctctctccccccacgtcgtcggccaaatcggggggtttcccggccatgtccacccctctcgagcccctataaagcttccccgcatctccctctcccttttccccctttcgccgcgctctcccgtgcctcctaccgccgccgcgccgctcgacactagcgccgccgcttgctgccacctccggtcgcgcgccgcagccgctagagccgccgccgcgccaagccgccgccgcctttagcattgccgccgcgtgagccacctcggccgccgctcggtttccgctaaaccccaccggaacccggttctcctcgcacaccggtgccgccgccgcccgtccgcccctcctcatcgccaggtcgttgccgccaccttcatcctccgctccggccgccatactcgccggtgaggatcccccctcctccctcttcccctctctctcgtttgcgccgcctctctccacgcgctcgccgttgccttcggtcgacgccgccatcctgtaccccgtccgccgtcgcttcccgcgtcgccgattgctgtcgccggcgaccgtgcgcgtcgcctccggttgccatggctggccggccggttttgaagccgagccgagccgtgcctagccgccgccgtgccgtccgatcggcctcccggccgatccggaccgtcggtcccgtggaccggcggtggaccacccgcgtggtcccggtccacggtagaccggccaccttgagccactgcccgtggggcccacatgccggcgcccccttcctctcccctttgagccgctgacccgtgggccccgcctgtcggcgccgccccccccttggatgacgtctgccctgggtattattgcgcaataattaattaaggactttttctttattagtaaaaacacagtttatcttctaaaattcataagtaattcatccgagctccgtttaagtccattcaagtctcagtaaatcaagaaaaatgcaaagaatccattaaaaatggttttgtttcctgtttcagtagtcttataccatgttttgcttgtgtgctttgtttgtcgcgtaggtttcggccgtttcgtcgatccgcggtttctcgaagacgttgctgaggtctcatcagttcgagagcaaggcaagtcatgcaatacgtttgatcatattgtacccaatttaccaatatcccgcatttctattaaatgttgcattcttttacaatgtaatgtgggatgggtcctattcctcagccacatattggttaccttatgccattgataacttgggtatcaaaatgactagatgttggcttaggaaatgcttagccatgcttagttcaactaggacacaaatggggatcacattattacatagactctgactatgggcatagctttagattggtgccaccgcaagggtgtcagttaattaaaatattctgaatggcgggctatgagtgcatggttttgctggtcgcacccatggcagttaaggaccggttcacgggaaaccctgggagacttaccgtgcttaccacaagcgggagtcggtaactgcttgatctgaagtatagctcgaccctttcctaggcaccggtggcgagggtgggcgtgatggagttgggtcggccgaggtgttcggttgtccagttgccggattcaccgcggcgcaagaggggaccgcccactgccttttgaggggtgggggtgaaaccttagcgtggtgtggatggttaggggagggttatgtggagggtcttgtcacgatttccccctttgcagtatcatggtgatacttcggggcatggcgacatgtgtggaatcgtgtcttgtgggtacagttgtacacctctggccagagtaaaactattcgaatagtcgtgcccgcggttatgggcgatcaaccagattcaccgtgattagtctcacccctagtttagcttaatgaactggtgtagttcaggtggttggttgggcctgttgcaacgtggtgtagcgttggacagtgattggttaatattgattaattactacagctgttttactgctttcaaccactgctttgaaatgcctgctttatgcaaaagaacccctagcttccttcggttatatcatgcatcatacctcctcttccggtatgacttgctgagtacagtgggtagtactcagtcttgctctcttttcccccacaccagagttgaagttcttctcagttggagccgtctcagagaggttggtttcgtcgctgccgtcaaggtttgcctgtggagtggagtcgcccgctgctgaagtcaagcttcccggtttagctcgcttttatctttcccgctgcatttgtaatcttttatatttttgtaagacgtgggtctgtatgtcaacaattgtcgtttgtgtaccctggctggtcctggacagggatttaatgcacattcagcttagaaattctggttcgagaatttctgggtgtgacatcccctcccctccgctgggccggccgaaggccaaggcccagctaggccggccgcctccctcctcccacccgggacgccgacaggtgggccccacctgtcgggcccgtctcctacctcgcgcccgcgccgccgcgcccgcaatcgccgccgcgcccacgcctccgcctcctccgggccacgtcggccacacccgcgcgtgcgccgcacctcccacgcccacttccccctctctctcgtccgctcccgtgcccgagatggccgggattcgattttcgaatcccgcctctcctctcccactccccgcgttggccggcggaatctcgcccctaccggccacgtccgggactcccctcccctatttaagcttccccgtcgccccctctcactttttccccatttcgccgaactccctcgtgccccccatcgctcccgcgccgtgcaaccacccgccgccgccgcttccgttactccggttgccgctagccgccgctagggtcgccgccgcaccgcgccgtcaccgccgtcgggttcgcgaggccaaactccacctcgtccgccccttccccgtcgggattcgtcgccggaattcacatcccctcgcgctccggtgagttctacctctaccgccgccttcggccatggatgccggccgccgtggttcatctccctctctctaatctctctctcttccttccttagggcaccccgaagcccgtccgccggttgccgtcgtcctcccgtggctcgccgtcgccgttcgtcgtcgtcttcctccgcgccggccaccctcggtgaggcgtcgtctccccctctactcccctccctctccctcctagtgccgcgccgccgcttcaagtcatgcgccgtcgccttcggctgccgccgccgcctcccgtgccgccggtcgccgtcgccgtcggccgcgtgccgtcgccgctagccctagccggccggccagctttgatgccgagccgagcccggcggccgcctctatcgccaccgcccgatcagctcggggccgatctgggccgtcggtcccgtggaccggcggtggaccacccgcatggtcccggtccacggtggaccggccccccctttgagccgctggccagtgggacccgcctatcggcgccgccccccccttgatgacgtcaaccctgaaagttattgcgcaataaattatttaaggactttttgttatagtaataaacacagtgaatcttctaaaattcataactaattcatccgagctccgtttaagcccattcaagtctcagtaaatcaagaaaaatgtgtagactccattaaaaatggttttgttctctgtttcagtagtcttatagtctatttgcaatgtttgccttgtatgtcgctagattccggttcttccgacgctccggtgtacttcgaaatagtcgccgaggttcctctagcagcagagcaaggcaagtcatgtttgtcacttgatcatgttgatcctatattgcaaatgttctaatgttttctttcaaatactgcatttgttttgcaataacactatgggatgtttacctattgttacagccatgctattttggtaccttgctcctttgttagctcgggttataacatgaatagacgttagactaggagttgcttagccatgcttagttcaactagcacacaatggggaaatctcatttaaaatatagactgtaggttcatatgataatgttggtttagtaccaccgctttggtgttggttaattaaaatgaatcacatggtgggctgtgggtgcatggttttgcttgtcgcacccatagcaattaaggaccggttcgcgggaaaccctggaagaatttatcgtgcttaccacaagccagcgtgggcaacggctgggcttgtagtgtagcttttctctagctgatgcatccaggcaagggtgggcgtgatggagtttggatgggccctgcgacggcctatgcggcttccggattcacctaggcatgagaggggattgcccgtcgcccgctggggatgggggtgaaacctgaggtgtggtgtgattggctagagagggttatgcgaagggtcctgtcacggcctctttccggtgtgtcgtggtggcatgtcggcgcacgaaaacgtgttgtggggctgtgtcttgtgggtacagttgtacacctctgatcagagtaaaactattcgaatagccatgcccgcggttatgggcggttaaccagattcaccgtgattagtctcaccctagtttagtcttttgaaattggatagtataggtggatggttgggcctgtcgcaacgtggtatagcgttggatggtggatgattaatattgattaattattacgactgttttcttctttaaatttctgtttataaatgctcgctttatgcaaatgaaccaccctagctctcctttgataattccctgcatcatacccctattccggtatgacttgctgagtacagtggatagtactcagtcttgctctatttttcccaaccccagagtacgagtatgtgtcagatggaggtttctccgaggagtaggcttcgtccgtgccgtcgaggatgcctgtggagtggtgttcccgctgcagttctagtcaaggcttagctcctgttgtctttcgtttttccgctgcatttttgtaagacttttataatgtttgtaagacgtggatctgtatatcaactttgtcgtttgtgtaccccggtcggtcctggacggggattttaatgcacattctgcttggaattctattcggaaatttctgggcgtgacaagcacccgctccaaccgccgcctgctcctttgccggcccaacactggaagagggggatggagaggaggtcgtcaccgctgccggcgaagggggccgccaccacaaggagaggtggacggggttgagctggtggctgaccggagcgccccccctcccccctcccccccgattcgcccaccatcttcatctccacctcccgctcaggctcggagagaagcgcccgcagcggcagcagtagaggaggtcgtcgcacggggggaggtgagtgcctaagtggagcgtcgaagcggatcgaggaggaggaggggcgagcttgggaggggaggagaacggacagactgagggagatggggaagagaacataccggttgctctgtgggtggatacgtggattaggaggatgctgctctggtggatggataaggacgacgggttgcaaagcactgtagcaaaagtattgtaccttaaaataatattcagggtaatgtatggagtatggagaacgctgtagcgattgatcgatctggaccattgatgaaaatgcatgcagattgtgtttagttttctttaaacttctaaaaattccgtcacatcaaatatttgatacatgtatagagcattaaatgtgaatgaaaaaaaccaattgcacattttgcatttaattgcgagactaatcttttgaggctaattacgtcatgatttgataatgtggtgctataataaatatttgctataataacggattaattaggtttaatagattcgtctcgcagtttacaggcggaatctgtaatttgttttgttattaatctacgtttgatacttcaagtggtgtgtgtccgtatacttagattgttttttaaaaagaacaaaaacacggccgcagtcgtcaggagcagttgcaattagagctgcacccaatctgaatcctcgcttaagctgcatattgcagctgttaggcattcacagtgcacagatgtcgcgttctgtcccaagcaaccacgttgaagattcatcgccacgcacacgcccgttgttcccaactgaaaaccacggagccaaatgaagctacacgttctttgttagaatttggcaggcatggggcgaagcacggggcaagcgacgcattgggagggggcgtggccccgcgcgacgcccctacacccgtgcaacggcagaagcggcagcatagggagaagaagagaagatggtacggcggtggcctagggcggagaagggaagatgttgacggcggaggaagaggcggcgacagatccagcacctaacctcattgtcatcgtcgttccgtgctgcctcgaagcgtagcagtgacaaatcatccatgtcgccagaactcccgttgcgccgtctgtcatggacgcaccgccgagccctgccgccccccgttcacgcgccgtccgccggtcggaggaggaggagaggtggactcccacccaccgcttgggccacaacaccgccgctccactccactcgctgttggtcgaaggagaggtggactcctgggcaccgcttgggccacgccgctagagctccgctccgctcgttgctggttggaggaggagaggtggattcctgttgccgcttgggccgctctatgctgctcaccgtctgtcgtaggagaaggaggagagatggagccccacccaccaccaatgccgcttaggccgcgttgccgccgctccgctccgcttggccatctcccttccactcgccttgctttctcatgtgagtcgacatatgattttggaaaccagatcgcacgcttgcaacacgagagttgacagcttaagaaagcacgcgtcaccactatgagattgagtaaatatgcaaaagtaatcttatctgtcatgattatcattagttttatgataaacttacctattttaaatatagattttttttgttaatcatacaaatttatgtccatctattcttacgtgaaagtaacctaatgcattcacggtttgttcctcccatggtacaatcgttacgctagcgtgttagaaacatcgttcatatcatacacgtacacgtggaataattgtccaaacaaaaagaaaaccgttgtgattattattgtcatattagaccgcttaaaaaatcattcagttaaacattatccaacgcggcattacccggtgcaacgtacggacattttgctaatgtgtgtatatatatatatatacactaatataaataggaggagttttgccttccaatcctaccggtgaaatcaaatccaacgacccgtgatcatctaccttacaatccaatggctcaaatcactccccaacgtcccacgcggccacgcaacgatccccttttagtttctgcgctctctccctctgaatcccctgatcccccgatcccatcccctttcccttgcgaaccctagcctcttcctctcaagcgccgccgcagtcgtgttgcctcccgatcattcgccgccagatcaccgtctttgctgtcctcttaggtgcagccgctacgcacacccacggtgcgcacttcctttccccggttccccagcccagtgctgtccccctcccttcaccgtgcaaaaccctaagcgccgccaccacaagcaggtaccgttgccgccaggagatcgccctcatgtcacctcgcttcgccagatcatcgacgcaccgcctcgccgtaccggtccggcgtcgactccgcacacgcttcaggtctaccacgataactctttctaggtagtcccagcatattgaaggtagtaccattatgaactttctcatgccatggctaactatcggcctatcattgtagcattatatatatctatatgtgttggtgtccacttacaatttcatgcctctttgataatcttggtaattttctggtcatatctccacctgtgcaaaatttccaaatcctgatggtcaattggttaccatgcactatatatgaatcgatatggaatgatgcatgctttattgttgcagttaatttcaacagagtaaaacggaaggagcgatggattctctacgccttgcaagtgcaatatgaaatgctggggatacgacatttcagattcatgcttcaagtgatcaccatatgctgataagctgagagtatgctcaaatgctcagccagaccttctcttagaggtaattcaatcatggatactttctatttttctctgcaagttcacttgcaatatattagtaagaaaattatatatattgcaaagtataggagccattgtcatttttgttatatatggcttccatcacccccattgattactggccaagacatggtatatgttttttccatgtagattgagagggaaaatatattatgactcatgatgttttaaggtccgaattaacatttcaaattatactgtggcttctgactctgtagatcaaaattattgcagttgcattatgccattagatgatttcagaaattcctgaacattgcataattcactcaattgacttaacgttgcctctgctttagcttgtccatgccatgctttgtttggatagttccaaagatatatttgctattgatcagaatcaaaataaaactcacaaagtttagagcttgtgtgatatatgggagtcctctgtttatatctcttgagtgttcactctgatataatcatgcaaattggagggtatgtgtgtaagcgccagtttgattattgtatttacccaaaaataatgattgttgtatatttgcatattaggttgtgcaatgcatactctttgagatgttgcactgcaactgcacaaatcttgatctttttttgtgcctgtattttcaccaggtttcacttgatgaggaaatgagtttatagatgtgtagagaatctgaaaaagatatttgggaagagatggtaggtgcatttcagacaatggcaaggagccaaggaggtaatttctgttgtgcgttatgaattagaattagcgatctaatctgtactgcacgttttccatttcttgatgagaatgtgatcaaaacgactttattggaaataccaggttcagaggttgcttaacttgatgaacctattggaaagggtgacaaagatttcgacaggtttttacttgttttgagcttaatccatatgggaactgttacagtaaactgaaattcacatttgtaattcacatgtaaaccattgacatgacagtgaaaccactggccattttgctggtatagtgatattagggccatacatgaattatagttcagtctttttttataaactttggtgatgaagttcagatctcttcctgttactgtattgaagctgcaatcatttcaaaaatttcggaactcaattctttttctgatggtagcagtatacatgtcattttgctggttttttttctttttttcttttttgctttaaggggatcagggcaggacagaaagaacactatgaccatgtccccatggcccatgtccatgtacgcatcaagctcccaagtgataatctgattgcctgctctgatcctaggcgccggcggaatcaaccttgacccatcaatgatggtcatcccccattgacgatcacatggtccacagagatcatggtgtcttggacaccaccattatttctgacggtttaagctttgtctccacaattttttatctctgtttttgcttctgatggtttatacttcagagtttggaactgaatgctcatactctagatgaattggtcatgtacttgaaattttgcacatttggtactgaatctgcactcaaagtgggtttcttgatttggttaggtacattgtataagctaggttcgcattttgtacaattgattaaataatatggtttgtctatttgcgtagcttcacgctattctgtctgtaaatctacagagcaatatatttgattgaatttagcttagccttttcgtgcattgcacgtgcattgttactggccatccatggaattaaatgtgttgtagaaactggcaagtgtcaattcagagtgaccatttaggattccatggtgtgcatgctttcttgtggcatactggtcttaggagttcaaatagagttttagtgcatagattaaagtgagataaaagtttatgcctgaatatataatttggtcatcttaattcattttcaggaatgttaatatgtatttatgtttccttttttctcaaaaaataaaacccaccgcagagaatgtatggagcataaatatgttctttctaacagaagttttgagtacttaattttgtgcagctttcttaaactagctagccctagaatgatcctgtttgttgaattggctgtaaagatggagggtatctaggtaaaaccgtaaaagatagacaatttatcaaatgcatcgtctactctgattgtatattcgtaaactattgtcctttctagggagtaatttgggtaaattcagctgagggaataggaaaattctccttttccttcaaattattgtgttttacggcaatgagaaaataagatcaattgttattctcctgtaaggaattaatttgttcttctgtaagaaaagaatgctctgatagttattctctttactacttactgtatcacttctagctgacaatcatttaaatttagatcacaaatgtttgtttacggaagtagcagcagtgcaatgtatgaattttaggtggcaatttcgtaccttttgcgaatatttttttttacctttgctggtcagaaaattgtaattgaacacaaggtttttatagatatcactgaccaaattgtcatcttaggataacctataaaattttgttctccattcgtaattgtttgttagttatatattgtcaacatgtgccttgcacgtgaatgataactagtacttcgataatatatcacattttcaattaattttttacttttcaaacaaatacgagccattagacgtaaaattaaatagtgccaacagtcaatattaaaaggcaaccaagtttggatgaagaaagttattaaaagcaaaggttactgctaaatctccgtattggcaaaaaagggctgtgattcgtgacagactgatagataaagacaacaaacatgcagtgatatgtgcagagcatctggaataggagtgaaatttactccaccaagaatctttggagtttttcaagaacaagaatcaaacctagatgaccatgcaaattcatccagcaaactttttccttgcggttcatccaggtttaagttttatacttgatgtgaatgcttgtatttatggataacttttttagtggtaggcgatgtacccatttacaacgagatgtctgatgattttgtctatctcaagatatatcgaatcagctttttggaagtacttgtatatgtagggtttgcatgtgtattcatatgagtgagtatgtgcgtattaattatgaacacttgcatgtatgctgcggttcgaaaaaaaaacaatcacactctggaaaaccattaatttatttattttccgctgccgggagctcctcaccgtgacggcgtcatgacctgagcgagctcctcctttatctgtgtgcgcctgaccactcttcgagcacctgcgagcaaggcgcctaccagtcaaacactgttcaacttggcgcactgattgttcatgattgatgcagtgatccgggcagtgcgtattgacaggcaaagaacgtgctcccagataaagaattcatgtctaccaatatgatgcaaaatagtccagcagtcagtcgatgacatactatattgaattgcttagttttatactccatttcagttccgaggtgaagaagatgacaactccgatcagatctatcccagaacattgcttggtcgttttacttgcaagtgactcaacgaatgcatcgtgcggggcattttattaggctccgggttccggaattttcgataacgacgaggcaatcaaatgtatagtaatcccttcgtcccaagcaatttagaactggatgcaatatatattaatacaacgaatttagttatagccactgtctatatttattgtattgggatagatgtgtgtaaattcgttgtgttttatctagttctaggtttaggttattatgtattgcgacggagtactttgtaacataaagtcgcaacgcagagaggagttcatgattcggtagagaaacctgcaccgctgcacgcaccacggcaccaaccaatcaaccatggtcggctgcgtccacacctcgagtccccgactaccagccagcgtcaacgattttctaaactattcgcaagaagctggatcactttgcaaaacattgtatcgcaaaaaagggtctttatgggaacgtgatcctaaaaggggtctttatggaaaaatacggagtaaaaatacttaaaacagggatgtttctgcaaaagttccattatatgggccgtgtagcactgagaaaggatgggcttttcttgggcttaatgggctgcacatacttccaccgagaccgactccgtttcctcttcgcgtctccttcctcaccggcgaccatggccgccgccgctgccaccggcacaccgcgatggagctcctcctcttcttcgttcaatgcatttgcgtcaaggtcagtagcatcccctcccattcccttgaacccttgtcttctcctcgaccttcaagtcgcgtagcgccgtaaccagtaaccacccctcctctttgctccaatccaggaccccaccgccatcagagacctgcgctcttgtaatcctgtccctcttgggtctccaacccgctcacctatctccgccaccacgctccagtactgaggtataagttccaatccccccccaaacttgcaagaaaaaactgaatccggattgcttttgcttgcacattgcgatttggagagcgaacaagttatgccatatgttcaatttaaattggatgcatcattctatatggttacaaacttgctacgagttggcagatcgaatgcatgatggaagcttatgattagatctagaaacttgcacgcaccaaccacccttcaatagaaggatttaccctctttctagaaaagtggacaacattgcgtaaattccacatcacaacactataaacaaagggccttgttgtccagatacatatggataagtaagtgccagctctaaccccaaacatgtacacatttctaagcatcaatgcactaaacaaagggctttgatgtcaactttgaatgagccagaactgcccaaagaaaacctgcatcctgccaatacagcagcatatggaggtcatttggagcttaggagtacagaaaaacatcagaagcctgtgagcctgtgactaatgagatcactgggttgagtatacgtttcatggatagacagttgctcatctagctagtactgcttcaacctaaccaaactgcagtctgacatatgaaaaacgcatgttatttgaaaaccacaactgccgtctgacatatgaaaaacgcatgttatttgaagaccaggacgggcactcaaattgttgtacgtaatagaaacctgtatgattgggatgtgttaccaatgtctatacagctggcattctgagtaggatgtcactggtcacctaaactgtgcaaacatctgaagagcctgagatgagatctgggcatggatcaagctgaattggccacggttctcattcaatccccaaattgtgccacaatgacacctaggaagataaaatggtagacgcaaaagcacacaaaaatggaggtggaaaaagaactgaaagtgtcacacttctcacttggagagtctttgatctagtaatgcctaactcactaatccagagaggctgctctggagcagatcccaattgtatagagaggggtggcaacatggaagaaagaaagaaaaaggaaaacttctcaaaccctatacagttatctagtagaaacatgtaggagatctcaccactcaccatgcattgcaggagaaggatttcttcagcatgtgggcatcacgggaagtgatcaaaacaggatgaaatccccatacgcgcatcgcagatgcagccggcacattgatcatttgatctccaccggaagaacacacaaaagtttcttgtcatgtttccctgtcaaaagaaccaccttggttgcctcacattggaagaacggagtcctttcctctgccactcctgctgctgaagcatgatctcccggccggcgccaatctcttcatattcgcgccgtccggcaatgcccggccactgcggccgccgccgtccttgctgtgctccccgtgacaccgtcttgaggaccccgaagagcctgccaggaggccgctctccctggccaccatcagctcgtcttccaggctcgcctgcaggacatcggcaatggacatccggccttcacggtgcgtgtctgacaacgacgacggcgcccttgtgggcggcatcaaggcgccgtcttctctgatctcagctgtgccatttgcatcttccgacctccccggaccatccttcgcctcgtggttgcggccgccgttgccgacggcgacaccggtcaccacgttctgtggctcctcgcgcacatgctccgggttgtcaattgtcaggaccagctcgtggttgtctctcctatcctcccgtggaacgcgggcctccggctccggcgagaccatcccgacggtgacgaacgcgatgttgcagcggcagagcgggcagttggagtgggacttgagccaggtgtcgatgcacgggacgtggaaggcgtggctgcacttgggcagcagccggaggctctcgccttcgcggaactcgccgaggcagacggagcagtccgtgctgtccacgaagccgtcgccgcgcctgtacttgcacactgtgatcttgttgatcagcgtctcgtccatcccgtccgacagcgcgacgctccacggctcctggctcctggaattgtctccgccgtcggcgccgccgccgctgccgcggtgagcgctggagccaaggagtctgttccggagggagctgaaggtgccgcagtacttggatatgatggtgtagtagctgacgaggaggaaggcgctcgcgagcaccccgatgatggcgatgacgagcggcgagaaggttgggccggaggagtcgtcggagctggagccggtgatgtcgaaggccggcggcggtggcgggaagatgaagtagcaccactgcgggcagtacatgctgcagaggccctgggagcaatccctggttggctcatagggcacccatgtaggctgcgaaccgagatttggtgttgtagggggagaagaggccattgccgccatggatacacaagcacagcagcaacactagaggtctaaaggggagagtctaaagggatgaaggtgacaaagaagaaatcccaataaacaaagatgaacaaatctttactgctcaggccatacccagactgccatgttctagcaccggcagaggatcttcatgaatttccggtccaataattgtggcaagagatgagagaagcaagagaaggtaggtggctctgcttggacttcagtacaacccagttctttcgtggccctgggaaatgtgagatgagatgggaagagagcagcagccgtgaagaatcagagatcatgagatgagatgctgccacaccagctgctgctactaagagaaacgagagctaatctccaaagcagagagggagtgtgcttgcttggaaagcaaagcattttgggataggagagcctgaatgcttgatgaggaggagggaggtggcggtggttgggaattggggccttctttgcctttggtgccattgccaccactgctcctgctctctcgtccactaccccttttcttttcatttccctctgccggcgctgttatttcttttcctttgcctcgtttgtcccctttggaatataagaaaataaagtggatgtttggctgggataaagtaataaaaatatggagtgatgctggtacaaaaatgcagtgtgactgtgttccaaaatcccaagactaaacagtgaagggaataagaccattttggaaattgcttagatcgtcgaagaaactcagcaaccaagggtgtgtttagttctttgggtgtaaagtttttgaagtatacggacacacatttgaagtattaaatgtaaactaataacaaaataaattatagattccgcctgtaaactgtgacacgaatttattaagcctaattaattcgtcattagcaaatgtttactgtagcatcacattgtcaaatcatggcgtaattatgctcaaaagattcgtctcgcaatttacatacaaactgtgcaattgtttttttccccacgtttaatgccccatgcacgtgtccaaacatttgatgtgacgttttttgccaaattttttgggatctaaacaaggcccaagactattttagttccaaggtttttttagtccatggtgcactgacgatttcgttcaagttggttgtccactagtcaaaatgaaccgactaaagtgggaacccgagaatacggtctccgtcacgaaaaaaccaacttctgaatatgaacttagacggatacttgtccaaattcgtctttagaagttagttttttttttacggagatttacctcttcatatggcttgcacaataattattctacatcataagatgacatatagagtaatgctctacgtctagtttgaatgtcaatgtagtaaatattaaggggtcggtcattaaaaaaaagtaattttcttgttcctgtgaggtaaaatacatgcgacgaattatctaaaattccaaggtttagaattttccattacctgagagagtatatacggagtatatcttaacatttttgtctcccaatatcagtaggaaaacattaaatttagcttactcccaagagttattttcataaaggaaaggtatgaaagaatgcagtatgtttagtcctcctatcaacgactatatatgcacattagcgcatatctgagaatcttgagtcactctcacatcattcagctaaaatttctctggcttcaagtaagttaaaagacaacggcggccggtctaccaaaccggtcaccactcaccagcttctttctttacatttacttcttcttagacacttaatccttccttctgtcaactcaagtcattaatgtctttgcactggtacaactacacaatagcctggtcacctaatcacacttcctcttgagtaccatatacgaccatcatataccttgcttaattcagacaaagctcgcgactatagattttatttattttctgagtgcagttgataaaatggactgcattgctgtaggttgtattgcattagcactagaggcaactgtttttactcttggtaggaatcgaagtactttcagaataagagaaagaaaaaaaaagaaaaaaccttcgagattttatactggaaggcaggacaaagattcatgagcatatcaagttggcttgcgacgaaaaaataatttaatctgatggaccagatagtgaaggccgatctgttctaataggtgtgattccttttagttttggggcataaatacgtcgttgtcgtacaatggggtcggcattcggccatgtgtgacagcaacaaggtgtgtgcagttgacgatgggaaaaataagtggggaacatgcggtccaagggagctctgcagttccattcatttgaaaggtgaagaccacctaattgctgtcctctttgttggtaaaaatcggaggattaccaaatgactgtcggtgtttttatacgtactgggaataatatcttcagcaacaaacaatatgaatcaagtgaactgacaaagaaaacatatattcaactgcattggagaaatttaaaggggaacagagtaaattcatagcaggtggtttagggctttaggctaatatcatcaaaggtattatcatcatgtggaaacaacgagtgtacaactttgtagtaccacctaaaagttaatctgttggctgctcctccgattccctccatacccttttcttctttgatacctttctacaagccgaatttagttcgaagttgtcaagatttacagagatgccatgttctaatgcgggtgtgaaccatcatgagacaaaataacagaatagagcaactttaactgaactgaggctccgacggaacgaaagtagtatccaagattgatgagtgctatttcctttatattttcttatagacgaattgcgcaagtagaatcacatcacaactttcctatcccctttttgctatttctctatttcttttcatctggatacgtgtaagaaagcagattaatggaagaagatttgttggagaagaaagatgtagttagaattttggaccacaagaacatgaggcatggggtcatcctgtcttccttttctaaaagaatcagtaccactcttaccttgctaattacatagtaaagcaaaaaaaacacttgctgacatgtggatttactgaaagaaaacggcagcagagtagattaacctcatggaattcatcttggtagcaaagcttttctgctttgcattaatctggtccaccctggctcattacagtttgagggagcggccgctttacgttttgtaccagtgaacagtactgcagatttggcctgtttgcctggtcatctcgcttaagagcaaggataatagtgggctataagcaagctatatgcttatgtgaaagagagataaacaaaaggggggagtgttggctctcatgcaagagctaactgcacacaaactttaagaaatatgcattaaattcatggtgagagaaagagagaggatgaagaaaataaagataaccttatagccaatctactatacatgttagctttaacattgactaatggtaagtagtgagctctactattaaacttgctctaacaactgcaccactgaaagagcgttaatggttgcagtgaatgtactcctatttatggatacggtcatagggatactatttagggtttttcttctttagatgtctccaacaatactgtactacggcctatgggctatggccgtggatgaggaatacttctctgatcaattttttttgggtctgtatcaaaccaatgcttcagttccagtgttgctgtccataattcataccctgtccactgattattaagtactctcattagcacgaatctaaatcaagaatatatgaatgtaatgatgcaacagatgatttcgctcttcaatagcatctcaaagttgttgggaactaatttatggcttccaaagaaagaacaaaaacacaatctatggtacatctgatccaaagaaattaatacaactgaaccttgagtgatagactgttttctttcagaagacgatggtgtggaccgatctcaatggtttacaactttacataggatatgtcaatagcatcatggtaccgtaaggatgaaaaatagtgatcggatctacgacatgtggtatagttatatcaaagctttgctggaaaagcatggacgaggggtaactaaaattcagactttcctttgctttgatgagctgtaaaaggatggatccacttgctggacctcactttacatgataaaataaagctgggcactatgtaaagagagaaatgtggagctacatggcacatattatgccaatgcagaaactgctgggctcttctaaattatacactgtttgaaagcgaaatgagatcatgtaaatgatgttaccatgtagcagaagactggtggtgagtgtcagctaggaaatgcagatggtttgtcagaacatagacaatagtagcataaaaagatgtggcagtatgcatgaagcaaaggtccaataattacagtgaattggttgtaactagagaaatagacactgagactggattcgatgcaaacaaaggtaaagctgcaaaaagaagatcacacacacttgagttgggttatcctttcttgggcttatcggtgaagaaactgagttctgaatatcaggttggctacatcatttgcattctgcaagcacggcaatgttcctagcgcgaattacgtgtacttgggagtagtagttaacagtagttacatgggagcgttatttccacaaacactaactacgagaaagttattataccggcaaatggaggcataaatttgttgataagttgataacaaaggagcctatccttcagctgtctagtaaacattatcaggacacgtcaacaatacgctagtagcaaagctgagcaagttgtcaccccggcaaccataagcttaaagtcgttaggaacaaaagctaaaaataagtcctttaactatagagcataatcaagccacatggaagttgtgcttctggtgaagccgggcatattctgctctaaccgacaacgcgaaagaatacctctttggatggcaatatcaaaagttgctcgttgtaggacctcgtgtgtaaggaagataaacgcatgcacgcgtcgcgcagattttgttgttttattggtcaggtgatgctcgcgcttgcgccacatgtttggcaggcaagttcagcgaactgtcgaattctgaaacaatcagggcagctgcccgacggcatccatgatccatccatctgaactaataaatcaggcacacaccaccattggccggagacccggagtcccgtcctcatgccggcatcggaaatgaacgaggagaagcacaaaactcagatcgcaccgtgcgtgaagccttgggagttgggagtcagcggcgcacggcgctcggcgctccacccgcaggaggaggccgtgcgaaggaggtttgcttctcggtgcgcacggccacggagcgtaaaaagtggcgtccgtgccgccgcccgctcacgtgcactcgcgaccccgcgggcggctggcggctggctctgctcggcgtctttgcgccttgtcatactaggccgagtggaccgagtccacctccgagacgcgagcagcaaatggcccacggtttactcgggcccaaccgagaaatcctcggcaaaaatcctaggccgaaaggtgaggccccgtgaaatcaccaaacctgtcacctcaaatcgtcaatcgaaggaataagatcactgtaggttccttaatatgtcgttcagtctgatttttatcctcagtttgaaaaatgggatatgatacatccctcaacttataaaatcatataaacaagatccatcagcagtattgatcatagttttagctgatgtggctcctacatggtgacgcctatgtggctcctttgactaggtcttcgtcccacgtggcattgacgtggcgcttacgcgacaattcgattacgacacacgtgggacccacatgttagttacacaaaaaaatggtggggcctatatggcccaacatgtcatctccctactccctcttctctctatatgaggacggagcaaccatctcctcgcaggcctcacgggactccccgcctcctcctgccttgcccccgttgccggcgggggaaaggagcggcgcgcggcaggtcgttggtggagcggcggagggccacgatcggagctgaggggcagagcagtggcgggctgcaggtggctcttctcctcccactggccggtgccccgcaccgctccgcccggaaccgcgacttctctcccgcttggctctaccgttcctctcccgcctcgacgaggtggacgaccgcgacgatgtccttcttatccgctcgccccactccgcccgcggcccgtcgccactctgaccacccgctggccgctccgcccctctgctctgctcacgacccgccgccatgcgccgctcctttccccgccggcgataggggcgaggcagggagtccggcgaggccggcaaggaggtggctgatccgcccgcttccgcccctctgctccgggcgtatatagaggagaagagggagtagagagatgacatgtgggtcccacgtgtgttattattttttgtaaccgaattgtcacgtaagcgccacatcaatgccacgtgggatgcagacctagtcaaaggagctacataggcgccacatcaactaaaaccatggtcaacactgccgagggaatttgttcgcatgattttgtaagttgggaatgtgtcatatcggttttccgaactaaggacgaaaatcaaactagacgacaaattgagggacctagagtgaacttattcttcaatcgaatgacaggcccgtatttgggccgaaaggagaggcccggtgacacaactgcctggttgccctaccatagtctattcagtattccgtctgtctgcactctgcaggagttcatcaaaaaaaaaaaaaaaagagccgctaatgttccatcaaaaaggaaatctgttcacgcggtacttgagacatgaatgcatatggctaattggccggcatgcggcatcaattcgaagagacgctttgcagtttgaatggtgagcactgagcacggttgggaagtggatggtcaggaggatacgaagccctcttcaagacggaacagagtacggtgttaatgcagaaactctcaggtcagcctgctcttttaggtacttacggaattgtgctggttccagcatctcttagcgcaaacccgtgatggtggttgattgatttcgagcctaattctgttattctgtggggacctgattgttgtgtttgtctttgccgatatttgtagaagggaactttctgcaacttgcattttgcaatcctggggccttgtttggcttaatcccctgtgtagttgtcttttgtcgaaatcgatgatcaaacgaatcagagaaacaaaagaaaactctaagttagacttgctgggtaaagtctttcactgatttccttgaatgcctcttaaaatgcgagggtttggttccaacaagaagacctcttaggatgcgttctaaagagctcttttgctaggcttcttattcatttattaagagcacgcttaccaaactgctaaactatgaatatcgtgaataaagttttctttaaaaataaaaaaaatgtttttaaatttataatagttattaatactctgtacagattcatagtattaggatatgtcacattcatccaaaatctcttactccctccattccaaaatataaggcacaactacccttaacccaaagaccaagaaacaattattatcatctcctagtttaaatcaccctaataaatataatgcatgcatccaataaattctgatatatatatatatatatatatatatatatatatatatatatatatatatatatatatatatatatatatatatatatatatatatatatatatatattaaaaaaccgcacccaatccgtggtaaccgcggtaaccgtgaaaaaccgcacgaaaccgtgcagaatttattaaaaattcaaattatttttaaaatttatttgaatttaaggaggttaccgcggtttttctattaccgtaccccgcggtaaggccagtaaccacgataaccgcgtggttaccgacaataatataaaccctggaaaaatccttatctccttctcctatgcctagctccataatccttattaaattttaaaaattgctatgttattctagaaaaatatttgagctcccgttagctcaccgtacacatgcagattttctagctctgccgctgatgtcaccatcggattttaccaacttaggtcatcgttgagtggcagaagcagtgggtattcactgtattctcggaaatgcccataattttcatgaaagaacttaatatatgtaggtatatgtaggggtggtaatttctctattgggactggggccaaggaagaattctcatccgcggttgagcggggagagggcccgcaaaattccggcgatggcagcgcggattagaattaacccgttggtgatccggagagatcctggatgtgagttacttctataaaagtagcctattgcaataatgaagacccaaaaagcccatttaaaattgatacataaaaacttaacactctaattcccctcaaccataatcccttcactttcttcaaccaacccccatcgtcggggcctaacgaaattttatcatactattattcaatgtattgcaatatttttatggagtattaactccatccgggtgatgagggccctggtcacccgtcgggtcgggtggggacgggtgatgtttttcacccgacttcctttgcggggccggggtgagggtattccagcccaaccccgccccgccccgccctgccccgttgccacccctagatatatgacatgtatatatactggaacatgtctaatacctttttctcaacaaatccactccacccacactagttttagctcacaaaacttgcaatctagtagccaattgcctcaaatcttctaaacactagttgccaaacatcaagcacatgatgcatgtaattattgagtgaatacccagataatagatcctgcgtccccaggtgccattgtatccttaaggtcaccattggatctagttgcaccgaccttaatggtatcaggtctagtttgatgaaggacgaagggaagagtgagggaagcagtaaagcaccaccctccctagacattgctggtgcacactgagtcactgacttgtcgttgttgactctatactgttgtgcaacaggcaagcaacaagattgaaactaactggacggtatttggcagattgggcgatcagcggctatgggcaaagagtttaaggaggggagcatgatccctcatctacatcgtgctttgatggtcgacatgctttttgaactccacatgtgtctccgttgctaagaaagaagaggacactactagaaaaatgtttttttcaggctgccaaaaatgattttttccggcgggggaacgatccatttgtatgccgatgattttcgcagggcgacccagtcacccgcctgtgaaaatcatctcgacgaacaaaaaaaatatcgccaccaccccacccgcgcccctaccaatctccggctgatctagggttaggggaactgccgccgccgccgccgccgccctcccccagcctcactccggccggatctgggagggaggggaactgtcgccaccgccaccaccctcccccggcctccctccggccggatctgggagggaggggaggggaaccgcgccgaccccgccgcctcgctgttgccgtcgtcgacctcgcgcctcgccgtcgccgacccgccgcctccacgcgtttctaccgcccctgttgctggtcgctgagggagctgagggagaggagaggagagctgagaggagaggtgaggtgagacttagaaaaaatcgcggtgccatgtcgtgtctatttatatccatgccaatttccgcaggcggatcacataagaggtccgcttgcaaaagtaaagggtatttttgcatgcttacttttgcaggcgggcgcctgcgaaaaccggacaacgaatttcaaccaggtttgcattttttgtaggcggccatttcgctccgagggtaatgtctgcctgggaaaaaataccccatgtctgcaaaaatgttttttctagtagagggagacattagattttaaaccactagatgataaatttagggattaaaaatgcacttttagactttatcaacctagctgatagccgattgtaattttgacatcaaccagcatattttattctttgtgtttttcttttgaacaatataattaatcaaacaggaactaactatatatccctccaggcagagggtaatatgtatgcattatcgtcacaagacaaaattaagctataaccactaacaagatagggtcatgacctatggcgtactattattcatatctatctacatgatgcatcggctgcgatgatctcatcaattgaacccacccagttatacctcagccaaagggataaaatcgctccaaaaaacttggcaaggaaagccataagccccctgcgttcgcgaaagccataagcccccacccccaacttcttgcaacggaacatgcaagtacgatgcatctctgtcgctttcgttatctcgagcaaacgagacatacacgccgcgagtaatccaaatccaggatgggcaatggcatcgcgcgcgatgcaattgcaatgcacagtcacgattcacttcacccaaaagtcacgcgagaaacctaacccctacgcaaggtgaaagccggcgaatccacggcgactcgcactggccgtccgatgctgaaacggcccaccactcggcgctacgcatcacggtccatccactccagtcccgcagccctggtggcccacagggtcgggcccacgtgacggcgaggtcggtctaatccaacaggtccatgtcacggcggtgactaatcgatcaaagttagggagcaaatgacacaagggagaggattaaaaaactccaatagagagaaaagaaagtcatgggtggcatgggggcgttggatggtgggtggcaacgtcagggtggccatggcacacgctggtggaggcgttttccgtcacaatattccagcctccgatcgacgacagggcacactcgcgcgcacgaaatgctgtcgattgccgaatcgcaccggacggactggttgagcacttgtttgatctgccgggttggacaggaagcgagcagtccccccttgcaagttgcaacgacatatcaagatatcactgcatcgaccgagagcttcggtgagaaaaaaatcgcagcgaggtgcctagtgggaactcagctttgccgcgcgataaatgcgcgacgtcgattgggggggaggaacggcttcttctggacggacgggaacggctgcaccggtgcaaggaaaaaaagcagagttgggcggaggtagccgtcgccgtcgagggcggccgctttcggggacaaatggcgggtcaatcaagttaggcggcgtcgcacggcacggcacggctcagcatcggcgtccacgacggttggccgagggccgagtcgtgccaccgtatatgcccagtgactcaccgctccagcctccagaagataccgaccccctccgcgcggcatctttcacgcgcgcccgagaagtccaaacacgtgccgccctcccgtcctcccgggcgcccgtgtgaccccctcgtgcaccggcatttcaccgagcaaccacctcaccgtatcagcagcggccacggcgagcagcctcttcatgccgcgtctgtgctggggtacacctgcagaatgtcaaagacacaccgctctgcgagtgaattagtgatcgatgagtcactcgaccgaatgcagcattggaagcgatccaaccaaaaacccgtggcgattccggggtaatttggagcagcaactcttttttttttattacatgggtaatataatgcacatatgaatatcccactgtgtgactgtctcctaccccaccacagctctgtacatctacaatatggaggttactactactgctactatatttttacacggttgcaaaacttagttgccgttaccgagtcgtaagcacccagcagtgcttggacttgactgggtactaactaggagtaactgaactgtaactaaaaaccgaagctgaaaagtaacaaacaagctataatatgtatgtgacgtggcttactgctcttgcccttctccggcattacgccggccggcctccgggaagggaagcgccgggctcgccgccattccggggcacacggttattgtgtttggctatgtcatgtgtacagtacactatgttgatcaggcgcggacgcgtcgagactccctagaactcgacgatgaggctgccgaagggggaccggtgcgggacgcccttgcggcgcttgttgccggtgcggtagctggcggaggtcggcggcggggtcaacggcgtgaagctctgcacgacgctgctcttgtcgctgctgccgccgctggtgctcgtgcacgagtcctcggactcgtaccgcgcgtccttgagcgccgccctcttcttcttcttcttgccaccgtcgccgccgccgccgccgccgccgcacccgccgtgcttcttccttgggcggtatccaccggacgtacccacaatctgcagagaaaagaaaataaagacgccattgttggtgtctacgagcatgcgtcgcgccagaattgatggcgttggttggtgcgtgcgtaccttgcatccgagggagcagaagcggaaggagtcgaggaggctgcgctcgcagacctcgcaggtgttggtgacgcccttgccgggcctcggctgggggcgctcgttgaggaacaccacgcgggcgctgttgatgatgtacgtctgcacgccggtgatgtccagcaccttctgtatctccgacacccggatcacgtcgtggtacgacgacctccgtatctgctccatccacgacatggacggacaggcaacgcgtgagtctccacgatatagatcgatcgatcaagaagcacacgcattggattaacagactgacctggatggcgtggtggtcgcggtggtgggagaggcagagggagcagagcgcgccgttcatgcagtcgaggcagtacatgttgcactcgctcttgtgcgcgtcggcgtggatcctgcattgcacgaagaagctcgtcgacagcagcggcttcagccacggcggccaccgctggttctccacctcttcctcctcatacccccttcctccctgcacccccacattcaatccatcacaccccaatcaataaccaagaaacagagcaagagcaatcaatcagtcatcggcagctacttaccatgtcgcctctgttcttcagcgagaaaggggacgcatggtctatcgccattcccagtgcgaagcaatcgagagagagagaagaatgtggatggaagagacgagagaaaagagaggaagaggctcgaagcgaaagaaagcacttctgaatgtatgtagtgtgaagtcttttgtagaccaaggggggcaaaagacgaaaagtatctgcaaacaccggggttaagtaaactaatcggaggaagactcggggagagtatttgtgctcgttcttactcccaccgtctcaaaataagtacagttttacacatttgaccgttcgtcttatttgaaaattttgtatgattagtatttttattgctattagatgataaaacatagtactttatgtgtgactaaatatttttaaatttttcgcaaatttttcaaataagacggatggtctaatgttaggcatggatatccacggctgtacttattttgggacggaggtagtatcaactactcgtacatggcggatccgggccgtctcataagtcacaacccggcaagcacatatgaccgatcgaatggcagagcgtgtttccaaacagtggaatcctagcacagttcgaattgtctcctaccgcaatgtccctttcgcttgaaatttactaatcagagtgttgcattcacttgtgaaccttatcatcaacagcattatgatttactgatttctttttcgttacagtaacgattccgattgcaacttgcgacggggcgagacccaaaatccaccgtaaattgtcgtagagtaaagcagtgctatcagtttggatattttcttttcctacattttggaattatcacttgctagtgaatggatgctttctctaggagattctattgcacttgcgcatatgtttcagcttcccacatgaatggtggggaaaaaacattaggcgcacgtttctacccgaaaagtgaaaaggggaaaagttaccactaactacgccattaccaccacaaatactaatgtgcctgccacctttggcatcccacattagtcttccccaagtggatcaagagggggatcagatgcaaccttagccgtgcgtgcgtacgctgccatacactacgatatctttttggacggagcagagcacatcggcgagaagcctcgacggcctactggaatcaggatgccttttttctggtggcctactgcataatttcatttgccgttttgtaaagccatttcattttgccgttttgaaacctacaaaccggtagaaccatggcatcaataattcggcaggtgatgctacagattttctggcaatcgtagggcgttcggtttgtggtttggtcacccactcctgtaacgccatctgaaccattgtgcgtgctactgcatttcggcaattcctggctggtacttggaactgtgcacacagtcacacaccgaattgtactatatatcgattagattagcatctgagcacacgttttgtggactgttcgtccgaattttttttccaaccccagttcacctccattttcatgtgggaagaatcgtgtgtgggcccatgggatattgatgtgtgagatcatgtgaataatcagtaaccaggttaaagataaagtcagaaatacggcatattgattagtcttgcagcggttatacgtcgcatcgtctccttggagccagtcgtaatctcttagcagataatgacgaacaaattaagatttacatgttagtaagacgattacccgcagtatataatattagctgagtgggtccccaagtcgtagaaacgaacaagcaagcgttgacatgaatttttgtttcagcaatcaggtttcccatttgagttcagccagtctgctgcgatagacacagcggcgtagtacgttgcttcaacagttgaaccatcacgccgcccatgagtccatgacacatggccgtcaggttttctgttaacgattttctgcactcctggattcttggccgtccccttgattcacgggttcaagtaagcatttcgtcgagagatcgcgcataatctgcccaatgcgccaataattcagacgcagattttgacctaattatgttaccttgtacagttggccgaacttattaagacaaataaaatgagcactcctgtttctgaactgttggcagtcacctcaatccactgaatcttagtatagtgatgagcttatagaccacacacccctgatctgctttcagtgggttggcatattggcatctccagttcgggagacacctcaaaagcgagaggccagctctggcacaaaggccgaatttttcaaggcgtgccgcgtgcattgcatctcatctgctcttgatacagccattgccgcacagcgcttgtggctccagttccggagaggtgtttggataacctgactaaattttagccctatcacatcaaacactaatttagattattaaacatagactaattatacagatagaggttaatttgcgaggcgaatctattaaacctaattagtccttgatttgacaatatagtgttacggtaaatatgtactaatcatagattaattaggtttaatagatttgtctctcgaactagcctctatctatgtaattagtattgtaagtattctatatttaatattctaaattagtgacaaaagtcgggtatccaaacaccccccatattcctccggcgctaagtcattccgcaatcatctagagacaagaaaggtcttcgtcctctctctgcgtccaacccgaaggatccacctaaaaagacgagctttcatggctctaccgaattctggcacatggctgcatcagattacgttactactcctattacggacaccccgtgagagaggcaccgtgtcattgcgaagtgaaatgctgctccatttccatccccatttcgttcactagctgatcagaggctcttaacatttcggtatgtggctgtatgtgcagtgcagattctatgatatggtcatcagtttcagtactgtactgtatcgtacaggcaagggcaatcactcgatataaataggcttggaattttcaggcgttgcgtgctgctgcttcccatggcggctgccgagcaacgcggaaacggtcgcgcgaggacgacaaaaccgacgctttgttttaagcctgaaaatcattgggtggtgcaagtttatcacaaatattttagtacagagtcgtaatcctagtgccggccgcattgcgttagcgtttcggcctggaggaattaaaaacaacctgggaagtggttttttctatgacatgcgcaccccgctgctgtggatggctgaggcttaaacaggcgaaccgaggtgacgggattcatgattgattgctccagaaattggtattctaccatggagttggcacctggttgacacctggattaggttggtcctgatctttggagtatctattcgttttttccctttttgggttttttaaatttattgtttttccttcctttacaggttgtaagactctttttcaatgttttgtagtgcacatttctttaatggaaatggagggtgtttgccctttgataaaaaaaaattgctgctttcttcgtggttagctgacacaatcacacaacggcgggtttgctttggttgctctcggctgcaggtaggaagaaatgaagcggatgtggtatactgatattctgagctctgccgtttgtttcagaattcatgcaacctgctgtaaacttgtgtgccgggggccttgcaggcttgcaaccacggtagatggaatgatgagtttggtcaatatttttttttcttttacaaagataacatgtcagtgatcaggtgtaaccgtgtaacacgcctaatctaaaaaagaatagagacgatacacctgatcgtgagcgatgttcacccttacggccttaccttcattaatgcctaaaaagattccgaaataagtcattcttcatgccatcggtaggctacaggttccttttatagtcgactagattcattgcagaaccaacaaacaaatctatacgacgagattgctacctggcggtcaatcgccaggggcgatcacgatcagattcggatcccctccctccacatgtttttatttttttttttcaccacattactttcctattttaataaatttatgcacctaaagtttgtacacctcaaatttacacatctaaagtttataaattaaaagtttatatatccgattcaaatttggattcaaatattttttatatatagtatttctatacatctaaagtttatagacccaaagtttataagtcaaaagtttatataccctattcaaatttgaatttgaaatgtatccgattcaaatttgaatttgaattcaaatattttttatatatagtatttctatacatctaaagtttatacacctaaagttcatagacccaaagtttataagtcaaaagtttacatacccgattcaaatttgaatttgaattatatctgattcaaatttgaatttgaattcaaatatttttttatatatagtatttctatacatttaaagtttatacacctaaagtttatagacacaaagtttataagtcaaaagtttacatgcccgattcaaatttgaatttgaattcaaatattagtttatagacccaaagtttataagttaaaagtttacatacccgtttcagttttgaatttgaattcaaatatttattgtgtaataagaagagaagaggaggagggagcgacggagcgtatagggaaggggcgggcgggtgatcacccacctattagccttaccctgtcttatatgcccatgaggcatgcccaacgcaggccataccctcggttgctatgtgggccaaagccacaaaaacgatctcatccccccaatggaagcaataccttcagatatacccttttcaaattaaagctgcacaatagattaattgcacaggtgcttcatgctacacaacgcggtgccacagcctaaacctagcctcagagcggcgcctcgcgtgagggtgcgcggagcgatcagagggttcgaacctcctcgcaggcgcgtggtcctcgccactttttggccccgcgtctgacatgtgcgcctaggggtacgctccacgtactcgcgttgggcatgccctgagttctcaaagcctcttttttcagtgttcacctctcgctaaacgctagtcggacggccacctactgactagcgactaggctgattaggtggcgactagacggattaggcgaattagacattttatctatctctttcacacaaaaatactgattctagacatttggtactcggtaaatataggcatttagacaaatatcataaatcatagttaagttcagaaatcatcaagtccatacaacgaattgacactgcacacgaagcattgggtttagtacaaatatatagggatagcgaacacatcagtatagccactgtacatgcacatcacaattcataaaccataactttatagatctgaggggctggagctaagagagaggaagaaaaaattatctagaactggaagaacagaggaggtaaggtggtggaggggagcctgatcccctgatggcctgatctagggttggcgtaggctgcttgagtggtgccgtgcttgactgcttcaatcggtgtgtttgtcaccttccattgatggcaaggatgaaggatgagatggagagcaggagcagcaaaggagggggaagaacgtggagcagcagaggaggagagggaataacgtagcggcgcggtggaaaatcgatgggcgcagcgacggagccgtctctcgtggcggtgtgaaaaaggggtaggcagggattgcgctctctctctaggctctcaaataaggcaacctaaatccccttttataccgagtcggtcccgcgtggcgcttctaaattttatcacgcccaaattttgatttctttcgcctagtcactgcctagacgcactgtcccgttgtctaattgcgcctaggcacagtcctgtccaggccgtccaggccgcctaggactgactagtaccgtctagacggtaaatcgactaattcactgcctagggtgtaaactggacaaattatcgtcgactagcgattaatcaccgtctagacatgctaggcggtcgtttaggcgaacattgcttttttcccatgtttcgccagccctggccatacatatctttttgccggttttttgctgggaataccgcgcacgtttatcattttgctggagtttaaaaaaaaaaacaggcgtcttctctaggcctcttcgacaaagccaaaagcaaatatcgcctcggtactcacacgtcctcaatccggactccacatgcgctcctgcatgctcttccttcgtgaagaaaaacaatcaattagatttctacgagtatcatctatctatctatctatctattatattattaaaacagccttaaaagaagacatcatgttcgctgtagggctataaattctcacattaatcagagaaaaagaaaagaagagtccaattagaaattcaattcaaaaatatctgaaattcggaattaaaataaagcaatattgaaagaagtgtccatataaaaacccaatacgagattaatcaaaattcaaaataaaaataaaataaaatacgaaattaggaaataaaacgagtctaaataggaatataatttaaaaataactgaaattagaaattaaaaataaggaatattgataaaagagtccatataataacccaatacgagattagttaatattcgaaataaaaataaaaataaaatctgaaaatagcaaaaataaaaggagagttcaagtaggaatacaatttaaaatcaactaaaattcagaattaaaaaaagcaatatttaaagaagaatccatataagaacccaatacgagattaattaaaattcagaataaaaaataaaataatatccaaaattagaaaaattaaaagagagtttaagtaggaatacaattttgaaacaactgaaattcaaaaatgaaaaataaaaatattaaaataacactatacggtattaaatattttttaaaaaaaattctgaaattagaaaaagaaaaagaaaaaagatttaaaatagaatacaatttataaataactaaaattggtgataaaaataaagattattaaaaaagagaccatctaaaacacacggtgagataaattaaataacaagcctataaaagagtagagtggtggcggttgattcgacatataaaaactgttagtaatacaccaaatagaatctttagaaatcccgtcaaatgctgccaatatactcctctatgacccatctgccgcttaatctttattgtcattagcattttaataattgaacaaaactatcgttggaattcatattttactttcaagatgtcccaccaaccatcggtaggccgtgaagcaaacgggtaaggcggttgccgggacttttagaaagtaaaaaaaataaaccccatcgataatcatattcgatttttaaaatctcaatgataataaaaaggagaagcagtaggcggggtgtataggagtatagttgcagagccgccgacggttggcgggatttctagaaaataaaaaagaattccaacgatagttatgttcgatttttcgaatcccaatgataataaagagtaggcgtcggatgggtcgtagaggagtatagtggcatcgtttgacgtgacttctaaaaattataaaaaataaaacccaacaagacaataaattttaaaactacagggtccaatttttaaaggtacgaaacttctaaaaagtaaaaaaatacaatgataatcatgtttgattttaaaatcttaatgacaataaaaaaaggagacagcgggcgagccataaagagtacaatggcaaaaccgctgacggtttggcgggacttataaaaagtaaaaaaaatgaactcgaacgataattatgttcgatttgtaaaatcccaatgacaataaagagaaaagacatttgacgggccgtagaggagtataatggtagtgtttgacaagacttccagaaattataaaaacgaaacccaacgagataataaactcaaaaaacaaatccaatttttaaaggtttcaatgaacgaaacccaatgagataataaactcaaaaaacagatccaatttttaaaggtttcaaggagaatgaatagaaatagtggtagaccgagcaagcaaataaagaagatatgacagaagtaaggggtagcagctggtgtgacttttaaaaactatatagttagaaatacggggatgatacggggataactatttaacaaatttaaagtaaaatcatactaaaaaaatatatgattttgtttaggtgctagccgtgcaagtgagcgggccacccagctagttcgatttatatgaatgaggtatagaaaaacctcttaaaaagtcctatgaattatgtgtacatactcatattccttcacttttattattcctatgagttaaaattctgatgccttcctccttggtgtgcagccgctggcatacgttggccatcttgatcttttgagtcctaaagcttcaggtgccaaatcttatcaaatctaggcaacgaccaacgatatcaacctccttcgcgtgtgttggcaagcttccctttgtgactccatcggttctcagtgatgatctgttggctattgccatctgcccatctattagttccgttgtgtaaggcggatggtaataacgggggagatagggatgcccacgatattatttttctagagtacccctccattgacaattgatcatcacattatgtttgtttagtaatatactacggaaaaaataaattgagagaccacaacgccgtaatctcggttggatggcccacgtatgcacgctgaccgcacatgccaaatgacaaactaatcaaccaataattattgtgcattcaaatcatatgcaagcatgtaacaagtaatctctcatcactaaattcttgattgcacttttttcagagaaggttattttttaatcggctctacatccaaccaatatatggagccatttgaattgagaaattagccccgcaaataatctaatctaaaatttactcctataaagatttaaacttagaatattggatactactcaggtcactacaattactaaactatgcacatgagaaaataggaatttcgcttgctcctcgtgttatgtgacgatcaattctgtttttttattttgtgtcagggttacggataaggtataccctctacccttggatatatgttgtatgttgatacggtatacctgcgcgtatacggatgtttcctgtatacattaaggaaatccatcacgtaatagaaacggagtccacggatggaaggagtcctactcggacagaactaggtcgttactatattgtgtggggtccgatatctgcgagttctacttggagatcgactaacccgcggtataaaagggacccccggggaggacctaagacatcgaatctcatcaccaacacaaccaccacagcctacgaagtcgaagccggcaggagctaggggtggaaacaagccgagccgagcctggcttggctcgactcatgaaagcttggtgcaagggaagcttggcttggcttggctcgctacaaacaatgagctaaaaggctctgctcggctcgtttatgggctcgagctagctcgagctggctcgcgagcctggcatcaagtaaatttcaagcaggtctaagagaaatgaagcaacattttaccacatagaatgtgtaataaagtgatatttttctttaatatgtcatcacaacacataaatagataatatgacaatcaaaattatcatttttaacaaataaatagttagaaaaggtgtaaaacttttgcatatgacactattgtactgagccaagcgagctcacgagcggctcgtgagccggctcgggcttggctcgttcggaaacgagctaggaaggaggcttgggcttggctcgtttggctttcaagccgagccgagctatgtgagcccgagccaagcctgagccgagctcacgagcccaagctttttgtccacctctagcaggagccaagtcgccgggtgatctagtcgaaccaactcgactacggtctcgtcggtatcatcgagttccatattccctttgtaatctgtgacttccaccatataatcctatatcaactggattagggctattacctatcaagggacctgaaccagtataatcattgtcttttatttgcttgatgtcgtactacgtagatcctcgtaccagcgtaccccaataccctctatatccggtttacgggtaccccatatcgacattttgataataggatgattgattgtgtctggagggaatatgtttttctaatttcctagctactccctccgtcccataatataagggattttgagtgtttgtctgcactatttgaccactcgtcttattaaaaaatttgtgcaaatataaaaaaatgaaattttgtgcttaaagtactttagatgataaagtaagtcaaaaaaaaataaataataattccaaaattttttaaataagatgagtgcaagcaaaaacttaaaatcccttatattatgggacggagggagtaattcatatttttttctcgggaagtgctcgtcaagagtcaagacctcactctttgctccaggtgtttctagcgagatgtggatttgacggtgattcttggaaggctattgttgacccatcttttttacagagcatgactatatctaacggtacatattgaatttgtgttgcatcggacggtcattattcaacatatgacgtggcttattatatgatcaaagcaggattcacttttcacttggatagatagatagataccctgtgtatatttactacttaaaaaaatctataatgatgatggtgaagccgaccctgatagacctgcacaatcacaatcgttccggaatcggagttcacagtccccgggctatcctcctttataagctgctctctgccttctcaaactagcgagtggtattaaacttgctacagtaccgcgaaggtactgtagcgagccgctgctctgcctgctgcgctgctactactactctgctgctgttgttgtgggctgctgttgggctgggctagccggcctgctgcttgctgttgtgggctgctagctagcttgctccttttctttctctccttttctttttcctctaatcattgcggggcgttacaaccgcaccgccccgctcacctctcactcagagcaagtttaatagtatagccaagtaccaactccaatttatctgtagccaatctaatagctcatttatacaatagttacatataagtatatactacaccattaatatatggtcccacctctcatacacacacaacgtattggattccacgctgcagctggctacaaatctgcagcctgttttccttctatctcttttcttctctcttccgcatgtgtttacaactgacttatagcctgctcttgtactcgctctcaccacgcgtccccctccccaaattccgagctccccaccacccgcattttgcagtggcttgcaatgcatgtcgccaactccccttctccgtgcccatgcatcatcggatcgagcgtcaccgtcgtcggatcaaggaagccctctcaacgccatcgttgtcagatcgaggggaggacgtctcctccgctcaacccctgatctccgcctcgtcgtgcgtctccgctccacgcccgatctcctcctcgccgttattgtactccgtcaccagaccacctcagcccacgcgtcgcaacctcctccatcaatgatgcgctgctatccactctgcctcaagcgccaccggcaccccacatcgccaccgttctccgccgccggaccactgtcgcctcgatctgctccgcctatgcgtcgctgcctcctctatccaccctcgccgccccgaccttcaaattcgtcagccgccaccaccgacaccatccatcccctcaccatcaccggctgccgattccactaaccgccaccccctcgcgctgcccaactccgttgacgatgatgcgctactgtccactctgcctcaagtgccaccgacgccccacgtcgccaccattctccgcctccggaccactgtcgcctcgatttgctccgcctatgcgtcgctgcctcctccatccacccttgccgccccgaccttcagattcgccagccactgccaccgacgtcatccctcctcctcaccatcgtcaggcgccaccccgccgccctgactactccggacaggtatcttcgtgcccatcctcttgtactgctcgatgaaatgccaatagggtattatttgttcacgtaacattacatgatatgtttttttttagttttacttgtcaaaactgaaaatgagatctctagattgagcaggaagacgatagcaaacaagaaaatatatggatttgttggttggttggttctgctatttctttttccatatttaagtgcagtatagcacaggataacactgcacttaaaatattttttttcatattatggttcaagtgctgatattgtggattgccataatactatcatcttccaagtgcaaattatcatggagatttctgggttgatgaggcgctgtcgttatggaattttgattttatgttcgtccatgattaccaggattgggaaggatctaatatgtggtttaggaaagggagtgcttcaacctggaagcatctcctgctcattatgctcttaggtgttttatttctgatgccgctactattgatacaacatggaaagtcacatattgttttaaaatatttattgtgcttaaaatactatactgtataatgtctgaaatttttactcatgcgttagatgtttcactttcacatgtgcacttctgttgaatgtgttgttaagttcacctatgaaccatttcgctaagtggtttacactacatttctttcacaggtggtgatcatagcagatagcaatccaattcctaccgccgtgtaggtgtcatcttagtaaaaaaaccgaaccagaccggcggttgaaccggaaaaaagccagaaccagcaccctcatcggttcggtttaactcaaagaccacacatgcagttgaaccggtacaaaccggatgaacgaaaaccggtgacgcgggctattttgaaccggcggttcaagaggcagatgggctggccttgtaaggcccacttggattgttgtggcccaattgcaatttaatgcctaaaaggagaaaatggtgcggtgcatagggatcgatccctggccgatggcatgaaagcacatcaacctcaccaccaaggcaactatttaagacatatagtctttccggttcagcaatcgaactcgtcgacacggaggtccagcactttatttttctactatgggtgtcatacactttattttttctagttataagaagacaaaaaaaaaagctaggtatgtttcttatgagcctgtatatgccactttactaaaagttttccatcctcaaatttttgaggaactcggaactaccgttaaacaaacgtgacctgttccaaaatatcataacttctccatcaactttctcttcccaaacaattacaaaccttcactattcacttttcccacctacctccactactcatccaattacaaccctccaccacttacttctacctactttcttaataatcatattcaactctaaaacttcttatattttattttaggacggagggagtaaatgttaattggaaaagcgtgcgtgtactcctagaatgtgaaggttcgattagagcagcactgctgattttgttgaatggcaacgtgaaaatattgtgtttcaaattatgattaatttcactatttcctggttgtagttccttcctttagaacaatcttccgcgctccgagaactaaaagaggtaaatataaatccccagacagaagaaaccaaaagtgatataaaattgttcattttatattaaggtttttgttacaacaaaattgcacgcaatgattattaacataatttcacgtggtgtaatttaaaattgatatatgtttttgtccgttgcaacgcaccgacacctaactagtgtaacaaaacacccacgcgaaatggcatgtgtttgggacgattgttgtatagggtaacagggacctgtgtttggaactattgctgtacagggacctgaactctggagaccacggtggcaacagaaaatcgtcttgtaaaatacggcatcttcagtttcgtcgatccgtgcttgaagctcataggcatggattagcagcggcagagaatctcgtcgataaattttcccgttcgctatccagggtataccagcccaatatgctagattgtccctggcctgtggcctctttgtctgcaacttgatcaaggatgatcagccaccgttaggaatgtcgagaggataacaattaaaggattgtctaatcgctacctaattatggaatcccccggtagttaaccggctaattaaaccacctagtaacacgcagcaacgtgacgcggagattaggggattgattaactatcgggaatgatggggagccggccagccggggattcgactagtcgatccccgtcgccgtcgcgtggatatttgacgccgaccggccgcggccgggacgcctggacgctgcgccgtctaggcggatttgaatatagcgctgtcgccatgtgccgcgcggtgcaccgggcacctaccctcgtcgaggattaccgcggggaccgtgcctacgccgccgctctctacaatagcagatgataccgcggcgtcagcccatgggctgacacctgcgcgctactgtgcctacccctccaccggtggttgcctgtgtttggttggctgattaattagttggtagttgctggtgctgtgcctacctgcaacatgttaaggatttgcatgcttgtctctttgaactggcagaattcctttccaaggatagaatgagtgtcgttgctgatgatgtgaattgatcgacctagtggctcatgtgctgtcaacaagggaatccgttttcctacttaaattgtcgtgactcctgagtcgtgacaaaggatgagtggcttaattggggacgcattcttgttctttgtgaagtctgaatctgcgcttctggcacgacggattgcagggaagattttgtggcttccgctctgccgacgttttggactgaaccctccgcatcaacgacagtgtacactctctttggtggtgtaccggtgtactgtgttgcgggagaagatttgggattattccctttcggagcaaactggatagttttggaggcaagatccagcactgaagagcaagtcgatatataggccattatctgagaacgaaagatgtttgcttctactccttgcgaacttggcaatacggtgaaaaatatatactacaggtgtcgaagcaggcggtgcattttttaccttcctatgggggagaaaaacaatgcgcttcctcccccgggtctgtaattaaataacatggcaaaattttgtccgtgcccgttcccgttgccgtcgatagccaaattgctctcgtcgttttccatgttccatgtacgatgcggaacgatggaatatctggtcgaaacgcaaccgcgcaccgtacgtgtacacgcgctcgtcgcaaacgtgcacggtttgcacgagtggccgacgtctagcgaaagccccagacgcagagccaacgacgcgcgcacgctacaccacaccgtggaggttgtcagccacacgtgcaagtacaaccacaaccgagggccaggcggtagtggacaccgcgccacgcccgctagtcaatccacgcgagtagtacgcgactagcaacggcgtgtacgtccgtgtacgacggacacgatgcctcgtcgtcccgtacggctgcaaccaggcaaaaaccggcgcggtgaggccaggtccgcgcgtgcgcgcctcgcaaagccgcgagtcgtccgtccaccagtccaccacacgggcgggcatggagaatggagaaagagaaaaaagaacaaacagcctcggtcccgtcacaaaagaccgacatgcggggcccatgtaactgaccccgacacgcctcattcccaccccgcacgtgcgccggcagccttatctctcagcgcggtggccaggattctctgcgtccagcgacactgtgaatggatttgcatattagtagtacactttataaatcttcgaattcatcatatataattttcataaatcttcgaattcatagtattactccaagcatgtcatactccctccgtcccataatataaggaattttgtgtttttgcttacaatgtttgatcactcgtcttatttaattttttttaaaattattatttattttatttgtgacttactttattatccacagtattttaagcacaacttttcgttttttatatttgcaaaaaaaattaaataagacaagtggtcaaacgttggaagcaaaaactcaaaatctcttagagcaaagataataatatagccaacctgttggctataaggttctttgtagccttctcttagcctactcatataatagttagctctttacgattaatacagggcccacttgtctttctcacagagtttattagttcttatgttcaagccggctgtaagtttatagcctgcttgtcctctctctcctctcttttctcctccatctcagcatttagccggcttatagcctactattatacttgctcttatatcgtgagacggagggagtcaattcggatcctctactgtagaggagaaatttcagaggtagctacagtgcccggcattaggagtactgtgaagcgtccgatagaagatggatggatcagatgagatgctacagtaaatctgctacagcactaaccagaggtgctacagtacattcatcccctgtagctacagtaaatcgtgactgtggtgtgcattagaacactgttcccctcacatattagtgtagctatagtgaccctctacattactgcagaggatccgaatccggagggagtacctcaaagtagggttttttatgggagtacattgttttgtacgagtgcggtgttcgcagaagatctttttcatattcctcagctgctagccgccagctctacggatggcacactcgtaaataactcgggagtacgtgccggtttggtgcgctcgcgaaaccacaagccgttagtagtaagctccggtggtggcgccttcattatggcctccgtctcgctctattccatttccattccgttctacagcgacgttgtgagtaacgcctcctctctctctctgagaagcgcggagcggagttaagagagggagagacgcagcaaccaacagcacgcgcggggctgagggggatgaaggccgagaaggcagcggtcgccgtcggcggcggcggcggcggcgacgagtggcggtgccggaagcacccggtggcgagatccggcggcggggtgtgcccgcactgcctccgcgacaggctcctccgcctctgccccaactgcgcgcacgtgcgaccctgcccctgcacgtgcgcgtccccgtcctcctcctcgtcggcgtccggcgaagcggtcggccgggtccacaccctcatcgagcgggagcaccggattgcgcggtcacggtccgtcgccgcgtcctcctccctcgcggcggcctccaccgcatcagccactgccggcgcggtcggggggaggcggaaggcgagggtctgggggtggccgccgttctggaagcccgcggccaaggacggcgttgctgctgcggcggaggaggacgaggaggaggagggggggatggggctcgcgaggtcgagctcggtctccgcgacggtagtggaggcaaaagcggcggccgcggcggcgaaggcgcggtgggggtggcacttcccgagcccgctcaaggcgttccggcaccggagatcgtcggcgagcatgccggagcgaggatgagtgagatggctcggcatggccggaaaaagcgatcagtagggatgtgtgctgctttagaggactaaattaattaattaactagacgggggagattacaggagatttttccttttggcctttttgtggcttcgcgtgctaatcttatgattaaattagaccaaactccaaagcctgtgatttgggcgtaatgtgtgcatatgctcctgccagtggtgttctcttcgttgcttttgctcctttttagcgtgcttgaaaacgttgtagcctgtgtacatcaaattgggaattttaaggtcgctgatttgatccgcactgcaccaggcgttctttttttatctctttttcgacattgacggaatgtgtagtttgtgctttgtttttctttcaggttggagtgacggtggaaaccccgtgtactgactgacaggtgaggcccatcccttgtttgcctgcagcaattaagcatgacagcgctagtattagtctggtactaagcgtactagtaggactaccttggaagaaatagcagtattagcgtgaggtttgatcagtagagcatactactctagtgtctactctatatgtcgaggcttcaaaaattccccgtctaaatcggggtaactgttagtactgatgcggtaatcattaagcaacaggtgaagctttgtccgtggaatctctgggaaaagattgtgatttctcgcgaatgcgagggctcgaatgctcgatcgccaccgctagcagtagtgttactgttggtagctgttcgccaatcagtcgcttgtgggacacgcacgctcggctcggtctcgcccctgcaatggcgcaagcgtccgagatttggaaccctctggatcccgaacgacgcggccgccggccacctcctctcccgatcggtaggcgccccgtcatctcaagcgtgtccgattgtccatgtggctaagtgacgctcccctcaccgcggctggattcttgcggggtgatcgacgcgacgcggctgcgttttgtttcggtggaaacagtggcttctgaccctcatactcctaagttctttattttttctcctttttttttcttttcgttaatccggtacaaaggcatgattgtgtcagcgacattatacagaaccacgatagatgtctgacgctccacggtagatgcatcgagtgaccactgaccgcagccgggggcgtctggtcctggatccctccctgcaagcaaaatggaccgatgcagcttttgtgcacgcgacgcacaccctccttccaggagtactagagaggagaaaacacgttgagcaaaggtagtagtatttcgaaagtcctatcccccgtcctccacgtggtttcttttttttttcaccgcattactttttaattttagtaaatttatacacctaaagtttatagacccaaagtttataagtcaaaagtttatatacctgattcaaatttgaatttaaattatatctggttcaaatttgaacttgaattcaaatattttttatatatagtatttctatacatataaagtttataaacccaaagttcataagtcaaaaagtttacatacccgttttaaatttgaatttaaattcaaatattagtttatagacccaaagtttataagtcaaaagtttacgtacccgtttcaaatttgaatttgaattcaaatattttttatatatagtatttctatatataaatttttccaactttgttttttttaaaaaaaattatggtgtagtaggaagagaagggaaggaggaagggggagaggagtgtataggccatatggggatagggatcgagcgatcgatcgcccattagccacccccgtagtatttagctatttgccttgctcatccaaggctgtggtggtacggcaaaaagcccacgggcaccgtccgatcctatcagccttccgtttccactcgatatcgaaggccctacaaaccatgggccaagcgtggagcaggtaccattgcccactagtggtctactagtgcagatcatgtgccatgactaaatagaacagtgcgatttatttcagctgggagacaaaagctgggaattttttttatttttaattttttttattaaaagttttacaaaaataattttccattttaaaaattgacggaagtagtcgcctaccgccctctgggagggcgatttttaaaaatcgccatcccagagggcggcgaaaatgacgtggcagacggccgttcgctctcgggcgatggccgtcaacaaaatttgcaggcggcccccttgccgccctccgctaaggcgattttgtactgtgcggggggccgcctgcaaatgggcggcgagggggcatggaattttgcaggcggcccccttgccgccctggggagggcgatttttgcctcccccctataaagcccagtcccccctctctgaaatttcattatattcactcaaaatccaaaaaaaaaacgaaagagagagaggggagggcagcagaaggggagcggcgaagccctgctggttcgctcacttcatcacaggtttgctcccatacatcttttgcatttgtactaatatgttatgtttgagtatatatgttgcgttttagttttagttccatatattttagcatatctgtagcacacagcacatatgtgtagatccagagcatagaatataatagtatgaattgagacatagacagtagtgttaattgtaagatgtagtttagtttgatctggagaatgtaacctacttttagaaggaggtcagggtcgtccatcagaaatttcacacagtggattgagaatgagcctaaggagaagtggtctctattgttcgacaccgatggatctcggtatggcataatgacaaccaatttggcagaggtgtacaactgggtaatgcgaggagttcgggtacttccattggttgctattgttgaattcatccttcacggcacgcaagcgtactttagggatcgatacaagaaaattggtccgtccatggccgataacaacatagtgtttggcaacgtagtgacaaagtacatggaagataaaatcaaaaaggcacggagacatagagttgttgctcaaggcacacaagtgcatcggtatgaaataatgtgtgttgataggagcaggcgtggtatctatcgcaagcaagccgtgcaggaatgtgtcttgaaggcggatggtggatgtacctgcagttgtatgaagccgaagcttcatcaccttccttgctcacacgttcttgctgctgccggtgattgtggcatatcttccaatgtgtacgtctcaaattatttcaggaaagaagcaatctttcatacatggagtgaggagatatatgggttcgggatctcaggatcttacacaacgctgagtgcccaagttttttacattccagacccatctaagttaagggtgaaaaagggtcgacgccaaactagacgcatcagaaatgatatggatgagtcagaagcaggtgggaggactttacgctgcagcaagtgtgatctgcgcggccatacttacaagaaatgcccgaagaatgcagaagttccaagcggcgcagatgctagtccatctggacaggcaagtgatggtaggcgaccacctggtgaaggaacaacaagcaggcgcgcaaggccaaggcgtcgtcgcgcagcaggcgattccatggtgtaacaatgctatcgatttaggaaataaaatgatgttgtgatgtgatgagtgttcggactaaatacttctatcgtgtaatttcaattgaatgttgttgtaatgagtacctccgactattgttgtactagtagtattgcgaactattcggtgttgtatcataatgttatcgtgatgagtgttcggactaagtactcatatcgtgtaactgcagttattgttgtaatcagaaatattccgtatggtgacacttttatttgtttgtactcttgtttaatatgtgttagtaattcgcttatgaacatttattacttatgttgaactaattatttatatgtttctgatcaatctatttgatgcaggtatggcgtacgacacaccggcgctgttgaaccgtgggattgacaggaaccaccgctcgttcctgtcagcagtcgagggtgcacagctcggcaccttccgtccacgcacgtcgcgcgagtggttgcgtgtcgacccccgtcacgttccttggtacgcgtatgttcacatttcaactcaactttgctttgtgttgtacttatgtttgaagtttgctctatacaggttgcgtgcggcaggccttctaccactttgtaggcttgttgaggcggcggcggacgaccgtgacccagcgaagcggtgggatgcagaccggtcactccttaccgctctggtagaccgctggagacctgagacgcacacgttccaccttccctgtggggagatagctccgacactgcagcacgtgtcgtacctgctcgggctaccgctggcgggagcaccagttggtcccgtggacggtgtttttgggtggaaggaggatatcactgcgcgcttcgagcaggtgatgcgccttccacacctaggaccggccaacacccttcctccgtactctacagtcgggcctagcaaggcttggttgctccagttcactgtaagtaaataagttgttattatcatacatgcttatttgcgatcaacagagtgttttgtactaacatttcattcttaattgtaggcggaccttctgcaccctgacgctgatgataactcggtccgacgctcccttgaggcgtacctgttgtggttgttcgggtgggtgatgttcactagcacccacgggcacgctgtggacttccggctggtccactacgcacggtcgatcgcggatgctcagccacaggacgtgccgcagtggagctggggttctgccgtgctagcagccacgtaccgtgccctctgtgaggcgtgcacgaagactgacgcgggagcgatcatcgctggctgccctatgttgcttcagctttggacagccgagaggtttgccataggtcgaccagtggtggacagcgcaccatacggggttggtcgcagcgcgcagtggccagaggacggtcccacgatggggacttactggtgtcgacgtggggttagtgcaacttcgctgcgttataagtttatcagtcgtcttcttttttttcttcacataacatgtctaattccgatcatgtttattgcagcgtcgttacgctcacgtccaggtgagacgaggttacccggacttcgtgttcgagtttgaccgtctccagccgagcgacgtcatctgggagccgtacacagaagaggccgtcgctgcgagagcaccgctaggactttcgtcgttgtgcacacgcgaccaggcttactggctcaccatcctgccgatggtgttcgacattttcgttgagcctcactgcccgcagcatgtgatgagacagttcggacttaggcaggtgtttccgggcaacgtgcagccgaccgtcctccctgccgaccactcgtgagttcggattgttcatttctaaatttttatgataattacttcatcgagccatataatttacctctcttcacaggttgactcgacggggacagctagcaggcgcactttgggctccacgtgtacagcagtacgttgacgactgggtgttagctacagaggaggtgatcaacgagctcttcccacacacggaggagaactaccgtgactaccttcgctggtaccttcctcgcactcatgcgcgtgtgaccttcactccagacgccccagagccgcacgttgccgctgtgacggacgcgtatcccacgcaccgtgaccgagactacttcgtgggggtacgtcgaatttgtattagttcttacaattatttcatttatcttgcataatataggacaactactgaattttttatttccatcttgcataggctgatgccgcacgggatatcagtgccgatatcaccgcagtccaagtgaggttgaacagaggtttgcacttgactgacgttgagcagagggtgaccttcgaccggatgcaggagaagatgcgtgcggtcatgcgcgtcttctcctgtcgcagcgccgtggacgtcgtacctccagctggtccggtacaaccacggcctcgtgcgcctaccgtcggagcaggacctcgacctacggtacctgtttcgcacggtactgctcagcccagaggtttcttaagttttgtttctgtttttgtacgaaaacatcaccccgtcgtaacttgatgttccatcctcgcaggacctcgtttgccttcgagcgcccctagcttcggagcagtgcgacctacagcaccggtttcgcacggtacagttcagcccagagattagttcatttttgtttcagcttttgcacgaatatgtcaccatgttttaacggcacgtttcctcatcgcaggacctcgtctgccttcgagcgcgttcacaggcacgaccggcgcttccgcgagctccgcaggggcgttcgccacctcttcctctcacggagcgtcgatccctcgcccacacggtactttactttttattaatactattaaatacctgtatgaaactgatggtccttgttcagtaggatttgcagccgggatcttcgatactggggcctcttcgtctcacgccggtaggactggtcctactagccagttctacgacgacgacttgcacggtgcacaccaccacgacgtactaggcttctctcagcttggaggagctccagaggcacactctcaggagcagccagaggtcacacctgtacaggcaggacgggttggccgtgccgtacccccggaccgactcacgtactcccaggggcacattagggcgcagggtaggagggacaggggtaagaggcctcgtcagtagtgttctacctcttcagtccttatgtgaccgtttcttttggcttacaaacttgtaaagcagtactacttttgctattactactgcagtactacttgtgtttgtctcgtctacatagttcttttcattcatatcgtgctagaacaacttatgctcacgacaacacactttcggcgcttcacggtagtgtcagatccagtagcgcgcacagtccacaacagtacacatgaaaagcggcagctcgagttgtcactatcaactttcggcgctgcctgttgacataaagtgaatcacgcccacgcgtgatcgtcttgtcacatctaatgaataatgtatctcattgagttcacatatattgcagtgaaaacgacgctatataattgacaatctgaaggcaacctcttcatatcttcttccccactagcacacaacacacgaaaatggaagcgccattccttgagcgtctcaactagcgaagcgatccttttgctggttggtttccaccatggtgtgaccgtcctttgtgcgattgtggggatggatgcatactcaagtcttccctcatgatacaaactcggggcaggagattcttccaatgcgcgaactttgatcagatatgcttcatctattcgaagttcaaatggataaaaaaaactaacttcttcgtacacaattgtaacatcttacgcagacatatcgtccaatgtgcaacttcatcgagtgggtagacatggagaacccacaaaacgacggaacccgtgcttacccacgtagtgaaacaagatcggactacctaaggcggaaggatgagcatgaacgtcgaattgctgctgaggctttagaatggcacgtaaatcccctaggactccccacgtggcgtgagcgtccggagtgtcgttgtggtgaccgttgtcaggtcataaggtccgtaaggcaccgaactcgaggacaaaggtgtttcgtgtgtccaaacattgtcgacgatgattccgtggtaattataactattcttttcatcactcctcagtactatcattaacttaactatcccaaaatggatgtacataggaagatgtaaggaaatgtcaattcgtacaatagattgacacagtcagagttacttcaagtggcgggccgataacgcaacctgaaccgaccatacagttcattcatgcttggatggagtacgaacgtcgggtggaaattgcaagcttagactggaggaacaatccattagggttacctaaatggtccgagcgtccaaagtgtgggtgtagagatcgctggcaggtggctacatcctttgctgaacaaacatttcgaaggagatattttgtctgccccaatgtagacaacgatttcgttgtatgtctaaccatttacaaaatccgctatgatttgcacaaaattactacccaaactgaataacattactatttttacagggcaatccaaggatgggtggatttactcgatggatcgacaatgtcactccatcatatcatggccagaagataacagagtcagaaacacaagtagagtatcaacgattgaaggaccacgagaatgcaatgcattctgaccgacctagaaggggccgataggttaccgcatgcttgattcgtcgggatcgacaaatttgtaccgtgtatcgatggcacttcttatctatcttatcattacaatgtttaattatgatggtgattttttgtatgcgtaagactaagggcctatttggattgctaccaaaaacatgccctaccaatattttggtaatttgaatagtacttgtgtttgatttcgattaaaacctattcattggtaatacgtaatctagatttgagattatgtagaacattcttcactacaattttacattttggcagcaaaccaaatatgatcaaatacaattttaccttaccaaatatttggtagtgccaaaacttgcttatattttggcactaacaaaatatttgtacggtaacattccaaataggccctaaaaaataataaaattgtattttacctgtcttggagattttaatcttgtatagttttcaatataaaaagatttgataactatttatatttatacaaaaatataaagcacagtataaaatcgccctcccccagggcggcaagggggccgcctgcaaaattccaggccccccgccgcccatttgcaggcggccctccgcacagtacaaaatcgccctagcggagggcggcaagggggccgcctgcaaatttcgttgaaggccgtcgcccgagagcgaacggccgtctgccacgtcactttcgccgccctctgggatggcgatttttaaaaatcgccctcccagagggcggtaggcgaccacttctgtcaattttcaaaatgaaaaattatttttgtaaaacttttaataaaaaaaataaaaataaaaaaaattccaaatgctggtacggtataaacaccagcgtcacacgctaactcgctttacaggccagaactttaaatcagaaaggaaccgcttgatgattgcattttttttttcttgagagagagagagagagagagagaggatgattgcaaggtcagcacagcaaggaaagactggccaggaaaactcaactggtagaactttccgttgggaagaaaattttgcatctctttctagcttcatcctgcattccttccactgatggcaaacaagtactccatcccaaaataacaacggagtaaagaatcctgagttcttcaaccctccgtgctaatcctaccagtttataataacaggcagccaaccatgtccagcaacaaaatatatactgcaactcagatataaggacgttgtcccatgtgcctgaatggagggcgtaccgctaaaattgctagctatataatcaaaacatgcatcaaaagaatttctccagtgctcccttgatacgagtaacacatacttgaatggagatttcgagatcaaacaccaaactggaactagtgatccgaactaagcacattttaatctcagcatatgttcatcatggcagatctgtgataaaactgataacaccagaactcttctatgctatattactgcatggactaaatgtacagaatatgtgaggttatgttttactgtcatctacttctgtcaggcgttcatgagaaaggataggcttaatttgtatttgtgtcaagttaaacaccacgaaactgttgctcttttttcggtgagaagccaagaactacatctggaaactgcgtgcatgcatttcttgcagcaaaaatacattagtatacgacagaatccattgttgtgttacaaagaacagagagatgccctgccgtatccatagttgtgttaaaagaaacagctaagcatccaattggcctcaaagaaagtactgaagaagctcatggacaaataagatgtacctatagatcaatggggctccaattccctcaaatgccgggccctagaaaatgaaatcataaatactgtattcgaagtgttcacactactattaggaatcatgccatgaagtcttaagtcttaaccaatatgcaaaacaaatttagcatcaggctcaaatgaaatgctttaccattttgaagaatggtctatgccaagaccattgcaggtaagtatcatacccttaaaccttgtaaggtactcctaaaagcgagggaaagacagcaagaaaaatcaacacaaagcgtgtagaagaggaatatggaaggccaattatagaagacaccttacacgcaaagtatatcgatttaactcataacatccggaaaggtcgtattcaaggcgcttagctggatcacttagaactgaaaaaacggaacataaaaaaaagtgaatcaggcaatgacgataacatttatctctaggaagtacatccatattgagatcccaaatttatctctaggaagtaaatgaggataataagatcatctgtgcctacataatggagagtggaaaatacctgtgtaggcttcattgatctcctgaaatttagctgtgacatcattatcccccttatgcttgtctggatgccacatctgtggatgaattatcagttacagtgtgttaatgtattattatttgcgtaccccgaaagaagtccaataacagcataccaaagctaatcttctataactcaatttgatggtgtcatcggatgcatcgtaatcaacctccagaactttgtaatagtcctgctattccaaatgaatataatgaataagacgtattaaaaaaaagtgtacctgtgcaagaaatagtataattgattatggacacttttcagaatatgaatggcacggtagtccacgtcacgagtacataggcggtaaagtgagtttattttggattagcatgacttattaagattaagtgcccaaatgatagctcacagcgcaggtgagttgcatattaacagagttgtaaaaaccatataataacacatattgagttcataccatagcgaagcatacaagtggcaatatacaggcttgaattgcctagcaaccccgatgtcttgtaaataaagatacactaaatcgcatgctgagtaataagttgtttggttgttttgcaccctttaaccacccacaaggccacactctattaatagatgttttatgcttgaataataattccttcacttcgtcagtagataacatttgctgtgaagaatagtacagacaaagcaacgcatctgccaagaaagtagaacctagtttgtgcaattcacagcatttgtcttagatgaataaaggacatcaaggtaaggaaattggtttaagcaaaaacaaacatcagcaatgcattgatcagcattttccaaatggctgcaaaagttcaggttaaaaaagaaacagctaacaggactcctataatattgtagggtggtgttcgacaaggagacctgacgggccgttacaatacaatggtgccacagattgaacctaaacaccagtcttcgtctcaaaccctcagtgagagggttgtactaaaaggctcaattcaccgattacagaccataggttaaatgtcgatcctgtgctgctgcattaatcaagaacctagaaacatttgcgcgaggaagatgaacctaaatccaccatacggaattcggccactcggcacagttgaccatgactaaatctggccaccagccaaacaatcatatgctgtccactagcgagaccgcgggcaaagcaataccacagtagctccagtactatttgtagccatcaatcacagtatcaaaatgccccaggagaaaaaaaaggtttggtccagaaccaaccaacaaattattgggaaggcctatccacctttttcctggccacagtgaacgaagatacaagtcatcggccactccaataatagaaaacaactggttcgcgcagccgcagcacagctctcttatccttctatacaagcggcacgaccaaaaccaaatccagccatagactgacgaactgaagctcaaacactcgatctctctctctcgcgcgcgcgcgggaataatacaaccggaatcgcggggggacgcgtaccttgtggggaggcttctcgcttgctccgtccatgcagcgtaacaattcatcacccccagctgatcctctcttctcgtcgtcgcctgtttcccttcctcgtgtccgccgcgcgcgttggcggcggcccggctccccgggcttggcttgggggatccgggaggaggaagacgaggggcgaatcgatcggaggcgagggcgaggccgagcgagaggccgccggagtgggtgggatcggagccggaaggagttccttgtcctctcctccctttactttatttcctatgcttttctattcccctgaatttttttgcaactttggtgatggataatagggggaggagatgacgtgtatccgacccggacacctgtcctttcgtgtcattgggagcgcccgctcgtctcgcggcgtcacccccgtgaccggaaagagtgtggggctccgatgcaatgggcctggtccacagggaattattcatgggccgttctggcctactgcaaatctgcaatctgcagtatatgctgctagtaattggcaaccaggcccatgaaaacatgcaagaaggaattagctcaacactgtatttgctcggtttacttctgatccgagggagtagggcattttcagatcgtagcaaaataaccttattaaattttagcaagatggtattattgccaaaatttttgcaggattttttatatatttaacaaatttagcaacaaactaaacgtatataattttttaataactttgctaaaaaaataatatggttaaaaatggcatcaaagtgaatctgtcctaagagtttcgctgacaagatacccaatattgttttctatcccgtaatttttggttaaaaaaagtcggtttcggatggttcatgatctattcttcttattctccactaatataaagctccaactctaaatctaccacgatcaacaagagggaagatcgcgctcagaaagcgcagaagttgagcaggtgaggagcggaaaacgacaaggtggctcatcttttatttgagagagttagatatatactcactccgttccaaaatataacaacttttatctcttaggatttatcccaaaatataacaacttcttcatcaacattctctttccaaccaatcacaaccatccaccatttattttttccacctaccttcactactcgtctaatcacaactctctatcattcacatctacctactttaactctaaaactttttatatcgtgggacggatggcgtattaaataagtttttttattccttaagttcctgagattaccaaatacttcctctgtccctaaatatttgacgctgttgacttttttaaacatgtttgaccgttcatcttattcaaaaaatttaagtaattattaattctttttcctatcatttgattcatcgttaaatatactttcatgtatacatatagttttacgtatttcacaaaagtttttgattaagacgaacggtcaaacatatttaaaaaagtcaataacgtcaaatatttagggacgaagggagtaagaagccacatttgtttggcgctttctaacttctattttcgtatctttcacacgcacatcaaactactaaatgatactcgtaatagtatgttattcggaaaaacattatacataattgtagttgcttctaaaatcatattagtatatttttcaaaaaaaaatagctaatgctacttaattaattatgtgttaatgtatcgttttgttttgtgtgtcgggagggaagggtttccaaccctctaaaacaaacacagcttccaggaggaaagggtctcatcttttcgcttatacttacacttatcagtcaaaatttgaattttcaaacttaaagttggagcttctttcgaggttttttattgaagtttatttttcagcatttgtatttagatcactaagaacgagtatataaatcttttattcacaatttgtttatttgcaaatatgtcgttttgcttattccgcaaaacgatggctccaataattttatgaagctgctggtgatgctttcaggatgtttttctctttcaaactggaaggaagaaaactgttcgaagagtgtcatgtaatgggaagaagaaaacatcttcatttatatatgctaacgatcataatatacaagcaaaagcaactatgagcaaactgtcgcatgagtcctaacaaatgccatggattaatatgatgctattgaagcgttatgcaaaatgtattgaagcgttatgcaaggtaaaatgatgctattctatataccggatcgaaatgccacaaaacttaatcaaatattttcaattaaaaaaatgtcacctaggactggtacagctggcttttgaatcgaaaattttgaaagtttgaagaaccggcatctttttataccatactagtaatacactcatactccctgtcgaggggtgaccctctttagcgagaggctgtgaggcccccctttgagagttcggccgggggcaactggtgagattagagaatttggtgagcgaaactgtgtgtgatcttgatctcggaggctcctccaagacgatgagacaaaagaggtttatacaggttcgggccgctatgaagcgtaataccctactcctgtgtgtatgattcttctgtgcttagaaagtccctgaatctctggtatgcaagctatggttagacaagctttggctcagggatcctccgtccgatcccccttcctcgctaggcatggtcctccttttatactctaaggggataccacatgtgctacgagtgctacctagggagaagggaaaatattctctatattaattacatgtcttgtgccttagctcagaagctatctgcacgtcggttgctgcgcggggcccatcaaatcatgcagggcgcccttgtcattcgtcatttaatggatgaggacttccgggttctcgttcacaccagaaaacgggaacccggtcagttcagagtggttggaccaactctgaccggggtaagaggctgtgaagcccctcatcattatgatgggacgggacagagcacgccgctcaccgcctgacacactgacagggcgggggtacacagtcgccgtcccatcggttattcaaccggtcagatgcgcagcacgccgcattaaatgcgacatggcgcggttgcatagaccgctttaaatgcagttaggtggcagttaggcgctcccacctaaccctgtacacgtgggctgatacatggaggggtcggggcagctcgaccccaagcgagggcggcctcctccctctagcttggaggggggcagccgccgcgccaccccaggctcaacccccctcggggggagccacgtgggtttgggggcggcccaaccccaagctgggagggggcagccgccgcaacaccccgggctcgacccccctcggggagagccacgtgagtttgagggcggcctcctccctctagttgggagggggcagccgccgcgccaccccgggcttgacccccctcggggggagccacgtgggtttgggggcggcccaaccccaagctgggaaggggcagtcgccgcaacccccgggctcgacccccctcggggagagccacgtgggtttgagggcggcctcctccctctagctgggagagggtagccaccgctccaccccgggcttgatcccccctcgcggggagccacgtgggtttgggggcgactcgaccccaagctgggagggggcagccgccacaacaccccgggctcgacccacctcggggagagccacgtgggtttgagggcggcctcctccctctagctgggtgggggtagccaccgctccacccagggcttgatcccccctcgcggagagccacgtgggtttgaggacggcctcctccctctagacgtgatacccccgggcccatatcaccggtattcccccatttcataatgtaagactttctagtattgcccacatttatatatcattaacatctatatgaatatggacaatgttagaaagatttacattatgaaacagaggtagtatgttataacagatcaggcctgattgactataagaagattagtgatgaaactttggatccatccaatgattacctaagtatactacgcgtgcgagtgcggtgcgtgatgagagtagggaatggattggaaggagaacacccctcatttgaaggtagcatagaaaattttagatctaaacttatttgagtttggagaaccatactagaaatatgtttcatagcttgtgtcgggttagatcgatataagtagtaataggctataaaaaatattagtgaaaaaaacttgcatccggtggttacctaagcacactacgcgtgcgaatgtggtgcacggttagaagagggaacaaaaggaaaacaactctgcttttaaggtaaaagacatatccatctaatcgaatccttaacactccacttaacatgcggggttgatcatggattcgtggcggacttctagccccatgggagattagctaccttgagctccacctaaaaacaacatgtttttttttcacgaaacaatgttcattgagtttaatctattatgatttttccccttcctttagccccataagagagacaggtactgatatattaactcgaacaacgaaaatagagaagaggaaaactaaacttcatatcccaagtcgtcgttttgacttattttctagttaaactttcttaactttaattaaatttataaaaaaaattagcaacctactaaacttaaattagttttgttaaatctagtattgaatatattttgataatatgtttatatttttttaaaaatactactctcttgttcctaaattgatcatcatataagtttatacactaagaccaaggataatttaaatcatatcaatcaagacaccgtacacacattctcccataatgcatgcatcgattaaaatcccataccaattacaccctaacatgcacacattatcccatactgcattaattgtattccaataaaattcgtgcccatgcaattacatggtgatcaatttgagaagttttggattttattacaggatgatcaatttagaaaggagagagtaatatatttttcaataaactcggggaaacataaaataatttgactaaagagaagtcgaaaggactgtaatatgaaactgtgggacccaccactaaaatgacacatgccgttgattggttgacacagatcggattcggaacagggaagccgcatccgcagtgtgttgacccacgcgacgcaggaaacggaaacgcgggagcgcgccgaaaatccaggcccccactagcccccccacaggcgggaaacgcgaaaaccacactctccccatcccgcctccttcctccgtctactcagtttctgttttttcacattttccccgtctcctctcctccggtcctccctcccacccgccgcgtcgtcagttttaacgcgcaccccgccccgcctccgtttcaaacccaaaatatttccgccccctcctcacctcccaaatcttcctttccctccttcctcctcctccttcccacccaacgatttgccctactttttttgctttcccccgccgctgctgcgattagtctccgatctcaaccaatcgaccaaccaaagccttcccctctccatcgattcagcagccgcgcgcgagcacgcaccaaaccgccacctaccgcccctccccgcgagcgaaaaccctagcgcgccctcgccctcgcatggcggaccagaacggcgccgcggccgtgagcgaagcggaggccgcccctgttcaggtgagatcctccggtctgcttgcttgtttttctgcagtttctggggggagggggggggtgcttggggtggggtttcgtctggtacggccgttgccagtggtaccttgcgtggtaagactggtcgctgttttttttttttgggtttactcagaacgcggttttagtcggcgggctggcttgtcgtgtggcgattacttgtgtttactgctcatttttgcaactcaggatgcgatcttagccaaacgtgtttgatttagatggttttggagttttgtggtgcgtttcgattgggttattgctgtggttctaccccaatattaagcagggtacatggcattcgtgtgctgggaatctggtagcaggtaggagtagcgcctcaccaccactttttattagtacataattattgggcaacactagtgacattcattcatggctagtagacgacagaaatcgtggtgactatcatgctgctttcccattttgtttgtgtgcaacgttccgcagtgtagttcaacaaactgaaacgatggtaatttcgacctgccttttaccttctgttttgtccaatttctgctagtacttgttacaaaaggaaatggtctgtagttttggatcatcgatacatggcttatttctgacaattgagttcttaggttgaaactggtgctgaaagtggggatgctgaaagtgagcagtaccaaccatttttctccatgtgccagccgattcgctctgttgtaagatgttaacctgacttccttgtacaaatatttgattacatgtgttatcatttctctttgaaacaacattacatgccttttttgtggctgctaattttttaactttgtcggtttcctggttttgcctgcagagctattcaaattcctgggatatggtttgtgcccccacaattaagagtaacgaacacaatgtatactcttatctattcttttttgcgattagcttgttgtcgctctgcttttggcatagttaatttaatatgcttcttctcatacgcagagcaacttggattcgatggatgataaatacatgctgagtgcaccttggcctgaaaatgagcagccccagtctgaggtatttgctaacctttctaagaatatgattgtcccagtcagtctgtttgggttccttaatgctgattttcaccaagtactgtttattaattttcactcagagcatttctgatacagtagataagaaagcaagttatgttcatgtcctttaataggtaatgaacccactttagtgcaacatctcatggaaaataacaatcaatggtatgaagcataagccttggtggtttgtttccctgatcatccctagggaactacgtgcctgttgtattttgtgctccgtgctcttatgtttcttcatgaaaaatacaattggtactctaattacttagtattttgccattttactatcttaatttgaagacttgcatgtagggcaccgttttgttgtgtgatatcgtgcagccctaattttttggactgcaggagttcaattgttagcttagactataaaaagttaatgtaatctaattttttagattaaaagattgggtgcccaagtgatttttatgttgcagctagctatgtattaccatgacatccctatacagtcggttgtatctaaaaatttgctaattttggctgttttttttcttgttcctttttttcagaatgacatggatttgttagatggggatacaaatatgcagtctgaacccctcagcacagagcagcctagctccaatgtaattttctatctatttgatcttctctggccctttgtaggcatgtgacccagttatatgtttaatggtgcacacaataagccttgaactgaaatatcttatccaactattctacataaactgtgataaccaggtgcctagagctccctaatattattgttggtggtgctgcaggatgaaatagatatctgggatgggaaaactaagcaagactcatcatcccttcttgacagcaagctgtgcaactccggcgtaagtggcttcacaatcacacctattactccctacaataaaatgaattgttttggggttcgtgcagtcaaactttgtaaatattagctgctaatgtgtctccagcagtattttagaaactatgcttataccatggcttaaaattatattataagtttataaccaaattaacagccaaagttatgttttagagactgttatgttcaaaacagttatgctaatgccattattttaatctttcttaaactgaacaaattggattgataaaaatgtttaacagagcggcgctgaaccttgcaacatggagggccaacaattttctttgtccttttcccgcaacactcaatctcaattggtggtatgttttatgcaatatcttcaaccctaagacttacgtatgctaatgacatattcaataattttgttatttttaaaatttcttcatatgcagggatctggtcttggcaatatggggaacacatgcttcctaaactcaattcttcagtgtgtcacccatacagtcccactttttctcaggcttcgttccactgatcactgtgctccatgctcatgtatggatagtttctgacagtaatgttttgctacctgaaaaatgtgttatctcattgccatttttgtttcatgataaaaaaaaaactgttggtctcctgcagatgataaagatggtttctgttcattctgtgctcttaaagaacatattgatgaatcaatccgaaggtctggatctgttataaggccagtgaggttcagagataatttaaggagtatcctttgctctcgatttttccttgcagtttaattttaccacatttgtgcacacatgctcagtaatatgacttgcatttttgacaatcattgggtgtttatgcctgaaaatttcaaggttaccccttatatgatttcataacttctatttatatgcttcctcagttctgtttcaatttcaatacatcttaatattcactgaatattgtgctgagatatatatcttctattgtatctgtctctggtacttcaaattagtggtggagttccttgacaagattacccagaattatcatcagattttagaccaggacaacaggaggatgcacatgagttcctacgttgtttgctggacaacctggataagtgcaccactgatcccaagccaaaggataagccctcatcttttgatgaagaaagtattgttaagcaggtttttggaggccgactaaaaagcaaggtattttactttgtcatcatgcttgttgtcttggcacttaaaagttgcaactgaattcatcctgtctatctagttgacttgctgtgagtgtggacactgctcggagacatatgagcccttcttggatcttagcctggagattgatcaggctgataaccttattgatgccttggaatcttttaccaagttggagcgaattggggatgctgaggacaagctgaactgtgaacattgtaatgcaaaagtttgtaagaacaagcaacttatgcttgatagatcaccagatgtcgttgccattcatttaaagcgtttcaccagccttgatagatctgttgaaaagattgacaaacatgtggtgtacccactagaacttgatttgaagccattccattgtgatcctgacatcaatgtgagtttttctactatctctatttttagcaatagctttaccaaaggcatgttttgatgttttacttgtcccaccttatgcagaaggagctgaaatatgatctttatggcgttgttgagcattctggttcacctagctatggccattatgtttgttctgttcgttcttcaccgagcacttggcatctaatgaatgactcccatgtatgtgtcacaagttacttgctattacttttttttaaattaaaaatactaccagggctttgcccagtagttatatatattaagagcaggatgtgtacagatacttgctattgcttttaggtttatcatggcatgaatcattaacctctgcaaacctttgttgtaggttgatttgattagtgaggcaagcgcgctgaaccaggaagggtatattctgttttatattaggcagggcaaatttcagtggttttcaagtttgctggagcaaaaggatgacctgcatcctgaaaatacgagtggtgcatctcccgtttcagtattggagaatatagatgtggattgtccaacatcctctggtgaagcaaccaacagttctggtgataaattagagaaagatgaaactagtcaatgcaaaacatctttccttgaggagccagctaagggatgcccgattgatggtatcaacaaggctgacctaaaagatgaaatcgtgccatgcatatcatctcatcacgattgtgtggctaataggtgtcctggtagtgctgctgacattaccaatttggacagaccctcaactccttcgccaaaacgcaagcgtttcttctctgatgataatgagtttaatgtgtttgagtttgaggacttcggtgacggtaagtcctacatcttggttccattttcttttgttaccaagttctctgcagcggaacagaagttcttacgcactaccctataactgcacactgaattattgtctagttatcatatcattggtgtaccactaatagagagattttaaattcattgatagacatactgttgctgtgctctgccaatgctgattacattagtttttcttttctgctaatttatcgggttcattgtcttacatggtactactgtacattgctttgctgattatcctttgaaaattgacgaggctgacatttctgcttgtgccatttgcagaagatgagacccctctgcttggaaaccttaaattcacatcaaaagctaagaaggctaaggttgaatcagcatctaaatcgacgaagggcccttgcatagataagaacgtaacacgattagtaaggagtatgccgtccactcggagaaaaggcattgtggactgcttgagccaactcaatgcagagcaggattctggaagctgtcctcggagtcaccctcttggcaaaaagaagctcggcatcccggttccaatcaaatggtagcatggtccgagtgccgaagcctttttttttccagctgtacatgttagtttagcatgcattttgttttatatccagaaccaacaaattttatctgcttgtcataacctgtatgaccggctagatggtgatagtgaggtacatttttgctgccttctgatgtggaatgcctcacctatatgtatggaacatgcactcggagtcccacttcatttgtgaaaaacagtggcaaagggaagagactaaaaactgaggagttttgtgtgggccggtgccgttcttcttcaaagtgtcctcgatgggaaatgggttcagccaagctacagcgaattatccaccaaacgcatccgtgtataggactaggagcgtgtgtgcgactgacggattgccccgtcagtttgtcacccaacagccgtggtccatcgcaacgatggagaggtcccaattcaagaacgaaacacataatcgacaatcgagagcgcgcacctgcgcgcaccactcacctaccgaagccattatatggcatttggcaacagaatctcacaaaggatcgcctctcaaaatcgttatgatcgcggcatagcacaaacgagtgaaaatgacatgcaatttggctgttcacttccgcgcccaaacagaccatttcatggacagattcacagatcactaagacaaggttccatgaaaaactgaatctggttagcagtgcatatacaatgatgataagatcagctgttccttcgatctaaacaagatgttaaacagaacaaatgggtcattttagctctggtggcccatcttgttccccagaatcataatgttgtgacagtgaggtgtccctttcgcagcaccatgcacaaagggttccacaagtggagaaagaaagaggggcccttgccatgttctgttgccctttggccggccataagttgcaccgatccaaacaaaggccatggaagcaaccaaatgcaggatcttcatatgtacacagaaggggaggtgagaaggagttcgcgtgcaagtgatcagctactgctagctaccatttctggccctttgccttgttgcttctcgttcttgcccaacaatgtcggtgtcaccgaaacaaccccaatcaagaacaacagtgctattgattgtttatcatataggtcactcaatgagctcaagtctcccaaagctattccagcctgtatttcagaaaagaaagaataaagcatgagctatgcatgagaagaaactagaatagtatgtgaatttgaagcaggtgatttaccctgacagtcacataggcagctgggattagtccaataaaggttgccaggaagaaaatatggtagggcacatccactatcggcgacgctaaattgatgaaagtattgggcaatgttggagttactctaaggaaaagcatgtaattcaacagcttctctctcctttttgcaacctgagaagaagaagcaaacagcatcagtcagttacagaatcttgacggatatcgaatcaaagaatcaaaatgtcgcatatcgaacatataaaaaacattgccatgaactagaacacagggagaatcctaagcgatatcagctgactaagatgcaggttaagaagttacctgcttctgaaagaacccaagtttgtccggccacaatgagaagaccaacggtttcccaatcagcttagacaggaagtagcatgaagaagctccagccgtggcggcaaagaccacaagggcaacaccaccaagctggccaaagagtgctccggcaaggagggacatgaatatggttcctgggatcatgaacgtctgcatgaagatgtacacggcacaatagcccaccagcacctgcacggtgtagtcgctcgtgtagtcctcgagatgatccctgcaaattaaacgtacacaaacattagaagcagtttaatttgaaacatccattgcccactgagacatcaaacagtgtaactgtgtaaggttgaacatgtgtagagtttcagacaaattcaagaacacaagtttatctgtttatctgaatagtgaagtctgaacaatggtactatttggcaagtggtgtttaacctaacagaaggccatagctgaagagagttcagatgtcaacaaaacattgttatggcgtgcagtgaccaaaaaggcacacatgatggaactcgatctgaccaatggccaggttcaaaacgcacgacagttacagctgggcagaaagtaaataccgagaagaaaggatttcatactccaccggctgcgaaaattacgcgattaattatgcttttcaatggattaaggggaccacaggctgcaatgtgtatgggccatacttggacatggataatcaggtcataaatccatgttctaccactccactaaaagtggacgccctactgtagaactcttgcaaatttcctaccgtcaccgtcagaaaagttttttcttttaccgatgcttcattttcagttacaacaaagcacttcgtgtagtactactagacaaaggtaacttgttcaaaggaatcactgagaccctttccaaatttcctttagaaaatatcctctctaaatcagtagaaatccacagaccaaaacgaagactgtctcaaaacacccgcaaaacacacaatagtggacggatttattattcagataagcaggaaaaaaaaactacagctttgctactacaagtccattatccaagaataatccgttacgttccgaaatccagcaacgcaccaacgcagttcaagcggaagaacaggatgaaattggtatcaacagtgaagatgaataaaatctttatatttggcaaaagtacggaacatatacgatgcaatttacgtacttacattctatttgaagttttgaacacaaaaaataggattcttcctacaggtaagttctagtaaattaggattcttcacaggtaggttctaaaacataaaaacgcacaaaaactgcaaacttttgagacaaaaaaaaaagagaagcaagtttctatcgaacaagcagtatcagcatatgcatagaccagctgaacagttagaaacggtatcggtcgaattacgtgaggatttggagctcctggaggttcttgggcagcttgaggaagctgtagtccgaatgaggcatggagaggtagacgccgacgagacccgtggcaaaggcggccgcgacgccggcgagcagtgccgcctcccacaccgggaacctctcctccctccccatctcctcctctctttcccctgtaaaatctgtgacgctgcgcgccgctggccgtttgggaggaagaagaagaggagagctgcagaagggaagaagaggaaaacggaggaggcacagtagtctcccttttaatccggacttcacaaatcacaacactgtgttttctctctcctgtccgcctctttttttatgagttttcttggtgaaaccgttttctatctctacttccttttggatgaggtttgcaagtttcgtatggctggtgacttttagcaaaactagattcagattttgtttggttgtaatcggcttcctactagtattagtttcagcgaacccagtattttccaccaagaatttggtgacttgaagcacacacccagtatgtttcttctcctccttggttttgtattagtttttgtactaggaaaataatatatggattttttttgacccctgctcttttcagttttctttttggatttttgtcgcggattatttgctcgatgcttctaaaagtacgataattcttctactccatctgtcccaaaatataataactattagcctttaaaatttgttctaaaatataataacatctccaccgatattttcttctcaaccaatcataaccctttgccgttcaatttctccacctaccatcatttctcaaccaatcaccatttgattttacatattttcttaataatcgtgttaaactttaaaaattcttatattttgatatggagatagtactatgttagaccatttattcaggagtatctataaaatttatttctcaaaatattaatttattgcgttaatcgagtaaaacatatatgtttcaaaagggccttgggacacaaggatttttgaagttttttgggctaattttaataaaactatccaattcttacttaaaatgatttttttcccgcacaacaaccagagaaaaaatattaaaggaaacctccttttgtttagtgtttagctcaattccctagcagatttccattcccctttcatcggttcgggcggacgcgtgctgttgaagcaaggtggggttacacttatactgcgaccaaacaccggccgtgactctgccgctcgtttgggttcagtggcatggagcttttcgtggccacccacaaaagtttggtgagtcatgaacaattcgccgagatgtccctcgcatacaagaggcagcggttgagcacgcacgccaattgtttgtgataagtttctctctagattacccctccgaatacgcgtaaaattcacctccatagtcgatagcgtaatgctcatttttcccccctagctgaatactcggttgtgtttgcttcaccggctcttattaaagacgcagaaacaaaacgcacgccaggtagctgaatactcggttgtgtttgcttcaactgaatgcacgcaactacaacatgtctgtgctcacggggttttgtatcacaggagcgtgcctctgaaatctgaacttctgattcaaactctcgaacggtcaagtggtcaagcctgccttccagggtaatctgttgccattatcccttcgagcaaaggctttgctgttgcttcgtcttgcagtttatcccaactgctgttggattggcattggcctagtcgtggcggcaagtgttgtgattttttattcagaaagggagatttcagacgaataatcaggtacagtagttgcaagcaataaaataagatgcctttgctgcatgattggcagttgttggaagctattgtttgtgtacgaaaatggagctgaatgtaaataatttcttttatattggaacgtgaacctgtaaagaattgcttggacggagcttgtttcgtttcaggtagcaagtgtactgtgtctttgttgtggctgttgtttctttcctttgcacggcataagcagacaaacgtaacggtttctgtggctgctgtttgcgagcatggatgcagagattgcagacaaaaattgataggaactgctcgaaaatcacttggtttatgaggctggagatctccgagcaaagaactgtatcattttaagtggttcctctcgcatgagactgaagcatcacctgaaccaattggccggagaagctggctagcagcagaaacaaggccccttcttttacttacagtagtaactcagtatatctgtcccaaaaaaaaccaaatcctggctatgaacctggacacgcatgtgtccaggatacatgtccaggttcgtagctaggattggacttttttttggacggagggggtagtcagtagtactaatctccattccgtcagacaccacaggcctcaactctaccgaccgttggacagaaacaagaggaaacctgactacctctgttaatatagtggaccagcttttgtatggcactacggctcttgtccccttggtagatctcatttcacccagcagatcagcagtgtgcaaaaaggacgtccctttttagcacgtgactgcctatacaatgtgacagaaaattctacacacatcatgtgaatatcagaccattgattgatgccctaataaccataactctctaccattcctcctcactctcgtgcgccgctgcccgaagattcccctacctcctctacgccaccacatcgccggtcgtcctcgacggtgccaacgagtcctgctcacctggcctcctccttctcaagctggcgacggagagtgccttcgtcgtcatctttcctgtctccagcggctcctccctcccaatgccttcaccctcacctcctaaccatgtgccccgcattgtccctactgccatcaccagcccatcgcttgttgtcaagcctatggctccgtcatctcctatgaccatccctctaagcttaggaaccttttctccttccctcatcagtcgtcccaaaccctagacccaaactcgttagaccatcgttggacactccgactcgctatattttccgtcaaacggaggttagtgattatgttttaacacctttgtttcgaaaaacaaagggcgatgaatcaagttcgacaacgggtttttcaacgagtcgtacaaggaaggagctataggtactctaatatttgtattctcggtgtcatggaatggaagagataattaaattaattaggtattgaacttctaatttcctttagaatctagacattattccccccccttgcttccgaaataaaataaatagtaaagaaacactaatgacgacccttcgagttgacaaaattcataaaattctccgtgaacgtattgaacaatataataataaagtagggataagaatatcggtcgcgtagtttaagtggggaatgggactgcttttattatagatcttggtgaaaaaaatgtcaagcgaattagtcgaattggtagaagggactaaggtattgtcctgaatttggaattaaaaaaaagttaggattgtactaatgggcgatgggagttggctgccaaattgaggccgtgtttagttctaaaataattcttcaaactttcaacttttccatcacatcaaaactttcctacacatacaaactttcaacttttccgtcacatcgttccaatttcaaccaaattttcaattttggtgtgaactaaacacagcctgaatgggcaactggactgtgcatcatgagttcatgacatgatcttgccatttactagcggtagccacaattgaaattctgaaaaaaaaaatgcagacaaagttgagcaaacgcccaaccatgttgtagcttcccatctgattcatggccacataatttccgctacttctatagttctatgtaaataagcgaaggaaatgattttttcttttgtctttggtcctcttaggctcatagtccatagacaagctcattggatgaggctaattctgggattgccatcgagatcaaattccctgtaggcgacgtcgttttataagtgaatatctaaggatgttgaactatgtggcatattatcggcatcatgtgaggaatatgccataggtaaaattagtagggaactatcgtaaggcgaaaatgaaagcggtgcaatccagtcgtgaaccagggaaacatcagtacatacatcatctaatgctgcctgccgtagtggcatctataagcatcatattccattattccttttgaagcatctcatcctccgttggaaatctccctcggcctttttcaccctcctttctatcctcagcatttttaggaattgtgggccgacttgagttattgattatcagcagaataagttcatcaaaagtcccttaactttacaccgaatccgattttcaaccttaaaccccaaaatcagatacagccggtccctaccctgtcaaaaccggtgcaaccaatgtccctcggcgttttggaaggcggttttggctgacgtggcgactacgtgacaattatatcttggaaaagtaataaaaaaggtggacccacatgtcagctacacccaaaaagaaataaaaaaggtggggctcaagtgggtcccacatgtcattcacacccccctcttcttcctcttttctccccagctcctctctcttcatccccctcccttctcctctctcttctcgatggtgaggacgcccggtggaagtggtgaaggggtggaggagcgaagcggcgaggttgagctggtagcacggcgagcaacgaggcaatgtagagggagcggcgagaccggccaccgccgacaagagcggcgagctggaggaggaagccggggcaataagagggggtcggcgacgacggtgagtggagcagatcgacgcgggcagcggcgggtcccccccaaagcagcgtcggcaaccgagatccaacagtggcggcagggagaagggcggtggctggcggggggaaggggtggcgtgcagcggtggccgccggaggaggaggccgtccaccgcgcgctgctccctcccccgctgtgggtgatggaccggtcgcgcgtgtggtgggacctgtgcagcagcgtcgactactcagagcgacttccgccgcgccgagctcgccgccgttgtcgccaaggaggacaccgccctccgtgctgccatccccgtccgccagcgcatcaccgtatgcgtctggcgcctcgccatgggagagccactcagcaataggacgcagtgctccccgtatctcctcctacggcggctgatggagagaaggggcggcgtgcggcggtggccactggaggaggaggagatgcggccatgcggggaggtgtggcggtggcagtcggcgcgggaatggggacaagagggatggcaaaaatgaggaggggatcccgccggccatcaccaccgttggcggtagtgagcttcccgcccctcagccacgcctcacccacggcccgcagccacgcagctctgccgatggcagtgacgaggagagggatgaagagtggtgagctagggagagaggaggaagaagggggtgtgaatgacatgtgggacccacgtgggcccacctttttaatttttttaggtgcagctaacatgtgggaccaccgtttttattattttttggggatagaattgccacgtaaacaccacatcaatgccacgtgggacgaggaccgagtcaaactagccacgtaggcaccacgtaagctaaaaccgcctttcaaaccgcccagggacttcatttgcactagttttgacagtttagggactggttgtatctggttttagggttcaaggacaaaaatcggattcggtgtaaagttaagggacctcagacgaacttattccattatcagtacaccccaacatcaccggtagtttatatgggccggatctacctcacatttaaacaacaaagaagtctattatgtgtctcacaactatagccccactctgattttcttcctcaatcgtaaaatgacatataaatgttccttcaactataaagatcagatcaatttacctcatcggtggcagagttcaagaggcgattcgatagtcacaaatccgcttcaaaaatcggaaactgcgccaacgggcagacaacgtttgggaagtggattcggatccgataacaaaatatttcagcacgcgctggatcaaacggccaaaaaaatcaaatgttttcagtccccgaaagctaactagcaaaacccaaattctaattggaactttcgtgctgtcccgacctggcacgttagtttgtgtttcttaaatcacaactatctctatccctaaatgtatgagcctactatgggatattctagtaaggtgttatattctatattagattgctatattttgaaatagagccgtactatgttgctatattatgagtcgtatatcataccatttgccatgaatctgcttatgtaaatgtaatcgcgtatctactaaattcagttatttaacttgtacagaaaaagagaaacaaatccaatactttctcttgtacataatcgtgaacccctcgttttacaatggaaaaataattgaatcttaccgcagcgatttgtttcattccatgtactgtactccttaacaaccaagaagaagcggaggcacacagcaaatatacagaagcacaggagatcgatcaagatcaatgcctctgcatctggtcctgctgctgttgctgctgctgcaagctgacgagcttgtggtaggcgccgttcctgttctcgatgagctggtggtgagcaccctgctcgatgatcttgccgtcctgcagcaccgagatgacgtcggcgttcttgatcgtcgacagccggtgcgccaccatcacggtggtccggttcctcatcacccggtccagcgcctgctgcacgacgcgctccgactccacgtccagcgcgctcgtcgcctcgtccaggagcaggatggccgggtccttcacgatggcgcgcgcgatggcgatccgctgccgctgcccgccggagagctgcacgccgcgctccccgactctcgtccggtagccctccggcagcgcgctgatgaaggagtgcgcgttcgccagcttcgccgcgtcgaccacctccgcctccgtcgcgccgtctttcccgtagaggatgttgtcgtagatggtcgtcgcgaacagcgccggctcttgctgcaccaggccgatgtgcttcctcagcgacttgagcttcaccttcctgatgtccttccctgcaaagaatcgcatcaaagccatacgagttcagaattcggattccgttcgggagatatgcagagcaattcattttggaagctgtgagatcgatacgtaccgtcgatcaagactttcccggcgatggggtcgtagaagcggaggatgagcgagagcacggtgctcttgccggagccgctcatgccgacgagcgccatgctcttgccggccttcatgaggaggtcgaggcccttgaacaccaccacctcgggccgcgccgggtaccggaactcgacgcccctcagctcgatcacgccctcgactctcttgacgtcgttgccggcgtcgatcaggacgtcggtcttcctgtccaggatctcgaacaccgacgacaccatctggttccccttgatgatgtccggcgccatcgccagcgtctcccccatggccagcgccgtcacgatcagcaccatgaatgacttcatcaccgacttgaagctggccatctccttgctcatcagctccgaaccatacctgaatcccgatcaaagctttcaaatcttactactgatacaaatttggactgaattattcaccgcgttccaaacttcgtgtagcactaaccataaagccaacgcgtaggaagagaagaggaagaactgggaaactccgtagaagagcccggcgccctggcctcgccggaatgactgcttcgctggctccttcagctcgtcggcgtagagctttatcaccttctcctcagcgcagaaggccgccaccgttcggatgttgctcactgcctccgcggccagcatgttggctttcagatacgacttgccaaggttgcccccgtagcctttcatgaacattttctgtcgcatcacaacacacagattgtgaatttgatcgagaatcagccaggatcatctgacgagattctgtgcttacctcgctgatgtggccgctgaccatgagggggtatgtggcgagaacgacgagagtgatccgccagttgatgatgaaggcgatgatgagcgacgtcacgatcatgccgatgttctgcagcaggatggtggagcggtcgacgacgatggtgcgcacgagcgtggcgtccgtctcgagccgcgacgacagcatcgagctcgtgtggctggtgtcgtcgaaccacccgatctcgttccggaggatggccgcgaacatcctctcccggacgcgcagcgtgagccgctcccccatgatgccgaagctgaggtgctcgatcgcgtggaacaccacggtgagcacggccccgcagcagaagagcaccgcgatcttgcgcacctcccgcttcgtggtctcccaccccatgtagtaggacacgagcgcctgtgtgacgccgagcgcgaacagcggcatctgcgagccggcgacgaaggcgctgacggtgcccgacacgccgaagaaccagtccggccgtatcatggagtagagcttcttcatcgacaccggcttgctcttgtgccctccttcgtcgtgcgcctccacggtgccgtaccggctaaccgagtccttctctgagcggaagctcccacccatgctcgtcctcgatagctccctcgaatacttggagctagcagcacgcaaaagccatggtcgttagctcgcggtggccggtcggaacttgacacgacgtcgtcacgttcacgttcacgtacacataccttagtggtcggctgaggctggcgctgtcggagaaagattgcttgttctggagctgagctgcttcctgcagctggatcagcgaggcgtaggcgctgcgagggttcgccatcagctgctcgtgcgtgccggtctcgacgatcctgccgctgtccacgacggcgatcgtgtcggcgttccggatggtggacagccggtgcgcgatcaccacggtggtgcggccgaccatgacgcggtccagcgcctcctgcacgctcttctcggactcggcgtcgagcgcgctcgtcgcctcgtcgaggagcagtatcgacgggttcttcagtatcgccctcgagatcgcgatccgctgcttctgtccgccggagagctgtatcccgcgctcgccgacctgcgtctcgtaccggtcggggaggtggttgatgaaggtgatcgcctccgacagcttcgccgcgtggttgatctcatccatgctggcgtcccccttgccgtagagtatgttctcccggatgctcgtggcgaacagcgcgggttcctggttgacgaggccaatctgctggcgcagccacttcacgtcgaggtccttgatgtcgtggccgtcgagcagtaccgcgcccgtgagaggctcgtagaaccgctcgatgagcgagaccacggtgctcttgccggagccactcccgccgacgagcgcgacgatcttgcccgccgggaagtccaggctgaacctgtcgaggatgacgacgtccggccgtgacgggtacgcgaaccgcacgtcgcggaactggatgtggccgtcgaccgacggcagcgtgcggccggccttggagctcgccttgttgacggtgttcctctcgatcatctggaagatcgggtacgccgctgtcctcgcccggaggaacgtcgatatgttgggcgccgcctgcccgagcgacctgcacgacacatattgcgaccaaattatgcacgggcgccatgggcgtgtgcattcgctgacacaaacacgccagggttgcagactcacaggccggcgatgacgacgttgagcatggtggtgaaggactcgccgccgttggagatgttcttgtggacgacgacgctggtgaaccagatgagcagcgcccaggagaggaagagcaccgagtgcatggagccgaggccgagacccttggcgaggccgcccctcttgccgtacttgtacgtcctcagcagcgcctcccggtacgtcctcactgccttctcctcgccgacgaacgcctgcaccgtccgcacgttgccgatcacctgcacaccacacctacggcggcgtcatcagtacgtgtacgtacgtcctcgtgctgggagaagtccattgagaggggcacgatcgatggacggacctcctcggcgatctcgccggccttgacgtaggacttgcggacgcgcgccatgaggccgatggtgacgtaggcgtagatgccgccggcgatggcgatgagcgggacgatggcgagggtgacgaggctgatctgccacacctgcgagaagccgatggcgaagccggccaggaaccggctgatgtagtgcatgaaattgcccacctgcacaagaacaacgcagctcgtcagcgccaagcacacacgtgacacgtgacagcgcactggatcgctcgtcccccttcggcccttcaagttccaagttccaacgcagcactgcgatttggaattctggaattgggcttactgggcttaagaaaaagggcctatattgggcctcgaggtatgtacggacgatacaggcaagagtagtcctgcagccttttcagagagctgggccgtccaaaccaggagtgagctaagcgacaccttttaaatggttagactacggagaaccgagcgttgctcggttggctagcgtcgccattgctcggttggctagcgtcgccaggtgagcgagtagcccgcgcgggtttgatcctgggatcgcaaatcgcgtgtctcaccaggggttttttccgtttccccggactgacttcgcttggtcccgactaggtatagggtacacgcgcgcgcgttcagtgggactgcatgtttcctcctagtgtgtgttagtgtgcgttagaaacgtgcacattcctagtgtgtgttagtgtgcgtcctgagttgtacccttctaaaaaaaaggttagactacgataaaaataataataattatggttaggatgcaacacacttgaacaatacggtatttttaagtatttatttttttaaaaaagatagtcaataaaactttaagtaatataaatataaatagtgtccattggcgagtactccctccatttctaaatatttgacgccgttgacttttttaaatatgtttgaccgttcgtcttattcaaaaaatttaagtaattattaattattttcttatcatttaattcattgttaaatatagttatatgtatacatatagttttatatattttacaaaagtttttgaataagacgaatggtcaaacatgtgctaaaaaatcaacggtgacaaatatttagaaacggagggagtaatttctttgtccaaaatatagaaaagcttttgaagtataatgttggagaccatgtaaaagctaatatcccttgtctttaagacggagggttctgggaacggaaggaataataatttttccagtggcagcaaccatcctccatctctccgtgtggggcaaccgtacatcgtgcaaatgttccaatagtattacaattgtacaaagaacaagcaagatgcttattgcgcaaataccccacctgcattactgtagaccaaactagaattcacatgttgagaccccagaaaatggttcgcagttcagttggcagttgggacgaaaagaaccatgcttgcaaagatggaaacaacttgttcctctccactggttcatttcagagaagtcgagatctacgacagtagcttagcctttccaatcaaacgatgtactcctccttcaatgatagcttaagaagggcgttttcagcattcttgtttagtgaatcgtaacaatcattttcacctattgctcaggaaattaagaggttggtactgattagcagcgaacagtacgccagtgaggatctggatgaattggaactggttaagtgtgccgtctacaaggcctttgtgtactcattttcatttagagtatatgatttaattagctcagacgataccagttacggtgatgacttagaattcaaacaaacactaggtgtagcatttgtgagagtataatgtttacgaattagctggctccattagctggagtggtcgcaaaaagttagtgttactgatagacaagtcaggcaacatagtatcagatcccttaaataaccacttggatgccatatgcaggttatgctctatccaaaaagacggtggctcaagacaatcatttattgcgtgttttatgccaatcctgtgagattattatcaccaaaactcatttttttttcaccgatacttcagggacagctactagaatatgcgacagctacttcaggggaaaaatactccccaagtgctagtactgttagtatatgtgaattagtagtagttacaaacagcactttaaatgtaggatgaggcacagtatagatagtactactgttttctttaaatttcatcttgttttcgacaggaacatttgaaccaacatcgtttacaactggcacaaaaatgaaccagagtacacacactggtggagaaaccatctttggtcggtcgcccgaaatccacaatagtctcggttccactaaaaaccgggactaaagatgatctttagtcccggttggtggctacagcgggcatatttgatctttagtctcggttggtgttaccaaccgggactaaaaatgatctttagtcccggttctaaatctgttaggccttgtcaggccccccgatatctttagtcccggttgataacaccaaccgggactaaagataggatctttagtcccggttggtgttaccaaccgggactaaagatcccagggatctttactcccggttgataatatcaaccgggaataaagcgtacgcaccagcccacgcacaagcgcatgcgtagcccctctctctctctatctcccatccttatctctttttcttctccttccttatctccatcctctccccttcctcttctctcaccccctctcctcctcccctccccctcttcctcttgcagaggcagccgacggcggcgggatgggggacgggcgcgggctggcggcggccggccggcggtggcgggatggaggcggccgggcgcgggctggcggcggccaggcgcgggctggggctggcggcggccggccggcggtggcgggattgcggccgggcgcgggccagcgggatggaggacgggcggcggcggcccggcgtgggccggcgggatggaggccggtcgccggcggcctcgccctcccctcccccagatccggccggaggggaagcggcgagatgggtggctggccggcggcgggatgggaggccggcaggtgagtcgatttttttttgattttttttaatttgtggtttggatgttttgatctgtgaataaatctatgaatcgatattgtgaatgaatctgtgatgttgtgaatgagtatgtgactcgatgttgtcaatgaacctttgaatcaatattgtgaatatatttgtgatgttatgaatgaatatgtgaatggatattgtgaatgaatttgtggtgaatctgtgaatcgtgctgtggagttgtgatgtggatttggggtttgatttgatgatatgcataccactcgattcgtgagaaaataaaaaagaaaaaaggactagctgatggactgccgctaccctctctttagtcccggttgataacaccaaccgggactaaatctttagtcccggttggtgtcatcaaccgggactaaagatcgatctttagtcccggttttttcacccgggactaaagatagcgatctttagtcccggattggtagtcccggtttgaaaaccgggactgtaggggggttacgaaccgggactaaaaaacacttctccaccagtgacataaagctgctacagttgggtggatatcaggatatgcaattcatttcatgggaatttaagaggatttttatgggaaatgaactacttcatgtgacagtcctataaaaattgcccaacatttttacaggattttaataggaattggttcgattctcattaaaatggagaatcctccattcgataacaggcctaagataatttataatattcatcattttcgtttttttctctccttagatcataacacgagaagatcaatgtacataaccacatgccattcatgcttaccggccattagttctggtagatattcagtaccattatgaatttatgattggcttgagaaagaaaatcacaccaaggtctttcaaaaaacaaaatcatcgacgaagctgccccctttgtgctgaagacccggagacacgccatcatcttttcatcagttgtagctacacaagacaggtctggaagaggacccagccgtgcctgtatatctcctgctgccagatgccatggaggagctaaccgaaaagataaatccgagcggtcccaaaaataataattttatttgaagacagagttttatgttggtcaatttaacgatattgaaatgataagaaattagctaatctaggaagattatctttacgtctactagttggctttattttttatatagagaagagtattttttacgcagcttttacatccaattgaaacttagccatcaaataaccgatctgaaatttggttctatagagatttaaactcaggaccacaaacaagaaacttagcccttaaataaaccaatatgaaattcactcttacgaagatttgaactcatgaccttaggtgctacttaggtcactacaatacctaggctagatgccctttcacactagttggtttcatacttgatatttaatactatcacatgagcagcgggatgctatgtgcatgttggagatgtaaactatttttattattaaggaaaaaaatcactcgtgtgtttggaaggagaggaatgcacgagcatgctatggcattatggcagagtggtgggcatgcatggcgagcggctgaatttggaggtgtcgtcatcaaatagattcaaagatcatgggtagcgaggtggtaggttatgggccatgagctgcccagctttatagcagaattttgatcggcttgtcctggttggatcgctcagaaatctaactaccaacaatcacatttgttgtaaaatattctaatttctcttttttcttaataaaatttgttgaagaaaatgtatcacatacgtggatcatttgactacatacatcccgccttactagaaacagtcacatcctacaaatctcctatatataaattgcttagatgtctatttcttccatctcattaaaaaatcaatctagtaccgaatgtgacgtattctaatacgacggattctatctatctatatatatatatatatatatatatatatatatatatataatactaagaagtgtcatatctgatattagattaggattttatatgatagaaggagacatatttagatttgtcatactagaatgtatcatatttgctactccctccgtcccataatataagggattttaagtttttgtttacactgtttgaccactcgtcttattcaaaaaagtttggaattattattttatttatttttgacttactttattatccaaagtactttaagcacaactttttattttttatatttacacaattttttttttaataagacgagtggtcaaacagtgaaagcaaaaacttaaaatctcttatattatgggacggagggagtaggttgtttttttatatggaatggaagaagtaatatggcaaattactgcagacactacacgtaccaaattaccaatcactccgcgtctccgccactccggagtcctggcttctgaacggcagagttggcaaaggcagaggatcactctcccctgcactgaactcaaatggagaaaacgtaaaagactggacaaatgtacgggatcccattgggtggattcgagtggttgttggattgatgtgcatcccaattgatagagatgaattcaacggagttaactcgaatcaatcagcgagtactcatatctactcctagtactgtttcgcagttactacagagttgagtggatgagcgcatccaggccagatcgagaggcgaagactgtgaacgatctactactgcccgcaacgccttcaatgcccctcaccaaccctaataacttcccggcgccgccccgccctatctactcacccgaccgtcctacgtttgcttccctgtctaccggccgtcgttaatcctctcctctccgatcgcttctcagtttgggattttctttttcccctttcgcttcacgtgaacggccggcacggcgtcgcgtgcgtacgcgatgccgcggcgagaaaaaaagcaacgcgcgcgggttgcatgtttgttacacgcgcgtggcgtgtgcatggtgatgttatgttacgcgggggtgagtagaagtgtgtgtaccttctcggagatggcgtcctggacgacgaggatgtcgctggtgatggcgttgatgacctcgccggtggaggcctcggtgtcgaagacggcaatgtcctggtccagcatcgaccggaggtacgcctggcgcatcttcgccgcctgccgctcccccgtgtgcatccagcacgccacctctgcacgcacacgagagccaccaatcaaccaaccaccgcgcgcattgcatcgctcgcgtctcgaaatctacgcatgcatcagggctcaccggtccacgacgagaagagtatgacgatgccgaggtacacgaagtccagcgagtactgcatgcacggggagacaaggtgagcaagcaaacagagtgtgacatgcacggtgcagtgcatgctcaatgggtggatcgggatgtgttactagctagtgtaccttggcgacgcggccggagacggtggtggggaagaggtaggcgaggccgatgatgttgatgagcttgccgaagaagatgaagaagacggggacggaggcgccgtgcgcgcacgcgcccagcgaccccaccgccatcagcacgtagtcccaccggtcggcgaacgagaacagcttcaggaacggcaccttctccaccttcgccgccgcctccttctctccctgctccgccttcttctcgccgccgccgctctgccgatgctcctgcacgccatgcaccggcgagctcatcttctccgactcgctaccaacaagatcgcgtgtgcgggtgagccaagacgctgtgtggcgcctgcgtggggggaggtggtggccggccgcgcgcgagctgaggctttaaagactaggagtacacagtggtacagctcctccagttcacttcactcgctgtcgtcgctggaatggtggcggccgtaatttagcccgcgttttagccgtggcagcagcgagcaaccggccgcgtcgcgtggtggtagtggtagagaaagcaaactgagactcatcgacgggtggggttggttggagtagatggttaatgtggtgcgcgaggtttgactcgccttgtgctggctactggctagctcaggccctcgcagtaatgggtgctgagcaagttagtgctgcagtaaagagcgtttgtccaaatgctgttgttggatttgactcgaaaaatcaatgctttggcaaatccccaaaaattaactgccgtgagtttacctgtgggatcctagtactgaatgaatggctgaacagttaatattagcggaattgttaaatcacattcgacattgattcttaggagttcatttttttttcagattactgatcttagtatttgctttacaattcgtgccctatgatcccgacaaacgacattagagttacgatctagggtgcggggaggagattactatgcttacagatctggccaggagatacgatggcttgacagtggatggtggagatggacaaaagacgaggcactagagccacagggaagaaggagggcggtgggctagcgttgacggtaaagggcaagtgagcttgtggttaattacgggtacgaacaactgcatatggctgggcggtgtgtggcacggggtggcgcccgacaggggcggtgtaggcggcgctcctttggtgaataaggacggccggatgcaggcggcgagaggtgacatcggcgctagcaacacgtgaggagaggggagtgactggcgccggcaacatgagaggagaggagaggtgacgccggcgctagcagaaaggggaagtgcggcagcggcggcggccctagcagcggcgcactcggaagtgcggatacaacagaaaggggatcgagagcagcagagagagatgcggtgtggatgcggtgaggagtttagggttttctctcctcagccgccggaggagttgggcttgggccttggctgttgtctgttgggctgggtctttactctagtctctaggagtcctagctcgttaaggctcgcaagcagctcgcgagctagctagctcgttatctctaacgagcttaaaagtcagctcggcctgttacgaaatttaaatgagccgagtcgagcgagctaacgagccatgagttttatgtccacctctaattgttagtacctctttgatttggtcaagagtagcggtgtagtcgagagcaaaattggcttgacacacaaatctgcggctatgcagttgttcgtacccatataccgtactgttataggtcacttctattgaaaaaaaacaaattgttagagtcagagatcacggccctttattccccactttcaacatgtctctccaacgcaacacaccaaagctcgtgtatgattttaccctgtagtaagatgaccaaaaggaatgaagaggtatctaggcgagatataatgatacatgtcaacggtttaggtcacgactatagtatttgcatggtatggggatcgtcggtaccagggaatatgcgagattaaggtaaaagagacaaagacaaggattttatacaggttcgagccccttatcggacatgtaatagccctactcctgttggccgaattcggtgttgctcctgttggacaagtacaatatttgggataacttatctagctgtcgtcgacttggtggcatagataaccaacacgtagtcaacgacatggtagtctttctcctcgagtacgaactcatcgagatcagaaatggcgctaaatccctcttgtcggcctccgcatgcaccatacagggtctgtctacttgtctaggcttatccctgatgttaatgtctagcggcgtgtgttggcttgtgtattgtgtgtcaatctgttgttgtgtcttgttggtctctccccctcctcctagggggtcttgtatttataccaatagatatcctcttgttcaattaaaactagagagaccaatatggatacaattcgagtagtacttgtcgtttccatatagaactctacttatcattccttatccggaactctttctatatacgagatatgattccgtataagacttaatatatggttgggcctgtcgtgcttagtcatctactattaggtatatggtatctataaccatgataatactacttggttaatccagggtgggatcagtttttgcatcacaaagccataaataatctaacatcagtacgtgggacattcttgcaaactgaaatggctggttgcagagttgcagttcgcaaacttcaaccttatcaggcgggctaaaactaaactgaatacgtacttaccctactcaacagtctatcgtatacacacatgtgaaatgcctcacatgccatggtctgtctacaagcagaagcagggcaacgccaaggaggcttttattttcacttgatctgacaccggagcagattcgtcttgtacttaatgatatgtaccgatgcgaggccttaaatggccacaagggaaaaagggggtgatttaaatgtggaaggaaaatgcagttgaggacgggatagatgggaggaggatcatggcctgatgcgatcagataattgccgaggtggacacttgtgccgcgcgcagcaaaagaatgccaagatgctgggacttttgctgagagcagcaagaataccaacatgctgatgactgatgagaaattgagaatgctttggttgctttgcttttcccatcgctgtggcgacggacacgcaattgatggtgaattgacgacaataatgtgtcgtttttgcccttgatttttttttgtcttccgttttttattttgtttagttcacatcaaaattaaaagtttgattaaaattgaaatgatacgacgtaaaaattaaaagtttgtacgtgatatgatagaaaagttggaagtttaaagataaacacggtgatgcgcgtagtgtgccaattcaggatgcgcaactaccgttgggattggtggttgcagaaaggcatactagtacttgcttctcaccgaagtacactgcccgtctgcattgcaagtttgcaacttcgcaagacaggcacagcgccggaaactgtaggcatattaagagaaaagaatatgtgtacggccatgtttccacgtcaaaataaataagaatacagcttgatgctcgtcaactttaagtatatagctgagtaaatgtgcatcagccaattgcatcctgcagaccagatacagattcttctgctgaagagaggaaaggccagggaaggaagagaacgagaaggtgatgattcttttttaatagaacgatggatttctgtgccaaaagcatactggaagttggaagcagcatttgctactaaggcccaggatcagtatgaagcccagcccatgtaatgacatggcagccagtaaaaggccggctcctcggtgttttgtttaggaataagtccatttaacctccctcatcttgtgcttgtctgaataacatcctccaaccggaaaaccggatatattacctcccccaagtgttaaaaccagtacaaaacaactccctcggtggtttttgacggtggttttgctgacgtggcagcctagtcatcgaaaaaaaattaaaatattacgtgagggcccacatgtaagtgtcatttctattcttcctcctccactctcctctctcctctcccttctctctccctggacagggcacggccaggggaggtgccgaagcgcgcgagagggatggggaccgccggaggatgcgggcgcgtgccgcgaggaaggggctcgccggccgcggcgcccgcggggagggttcgcttgccacggcaagcgcggggggcacggttcgccgggatgggtcgtcgaatcgccgccactgccgtcgccgccgacgagttggctcctctcgtcgccgttggtccaaagggaggagacggagacctcgctccccttgtcgaaatcggcggagctcaacctgggcattgctattgctgcctttggctccacctcccggatcggcaagacaacacagcggctgcgcaaatccggcagctcagcggcggtctccgccgcgggaggccgtggtagtggccagcggggtgacgagaggatctagtaggcaccggtgtctcgacatcggtggctgcaacgggagtcgtggtgggagacggcgaggcggtgatagtggccatcgtcgggcggcggcgcccgggtgtaggatcaaggaggccgactagagggggggtgaataggcggttttaaaacttagtggcacttaaacaaaactaacctaagttgctaggcaaggtaaggtgcaaggttaactaagcaactaagttaagttttgcaaacctaggtgatatgggctcaaatatgtctctatgaatgtaaatagaacaaatataaatacaacaaataaatgagacaagagacaaggaatttttcaccgaggttcgaaaacttgccggtttcctaatccccgttgaggcgagcccaactccaccgctcaaccacgaagccaccgcacgcccccttcgtcaaggggtgggcaaggcgggagctggtgtcacgcccagaaatttaacccaaatttccagactattttgcgtattaaatccctgtccaggaccagccagggtacacaaaacgacaagtaatatacagttccaaacgtaaataaagcgtaaagtacttacggaagaggcacttagtcctcacaccgaaacagaacgacagcagaggaaaaaggtgatcctagcggggcttcagctccactccacaggcaaaactcaactggggtctgagccttggtcctctaactccatcttcagctcagaagcactacacttctgaaaagggggaataatagcaagactgagtacaaccaccgtactcagcaagccacaccaacgatgcagatgtgcaaggggatacaaggatggtttgtggctatttgcataaaggcggttgtaaaatattttattgagcaaaacagtaaaactgttgagtaattaaagtaacattaaatctccactgatcaacgctacaccacgttgaacaggcccaaccaacccacctgaactacagtgtattgggtcgatttattaagatgggactaatcacggtgaatctggtcgaccgcccataaccgcgggcacggctattcgaatagctttactctgatcagaggtgtacaactgtacccacaagacacagccccacgacacgtttccgtgcgccgacatgccaccatgacataccggaaagaggtcgtgacaggacccttcgcataaccccctctagccaagcacaccacacctcaggtttcacccccgtccccagcgggcaacgggcagtcccctctcgtgcctaggtgaatccggaagcgacagaggccgtcgcagggcccgccccgctccatcacgcccacccttgcctggatgcgtcgactagaggaaagctacactacaagcccagccgttgcccacgctggcttatggtaagtacgataagttcttccagggcatcccacgaaccggttcttaactgccatgggtgcgaccagcaaaaccatgcacccacagcccaccattcaatcgcattttagttggataattacgaccatgaagcatggccagatgtctcgagcacgcagctcaacaagatactagaatgtctaatactgcaattatcccatcgactgagctagtggtaattaagcatggctaagcatatagttctagctaggtcatcaaagtaacacaagctaggcgatttattacccatggttgacaaaggacatatatcaagtaaacatggcacaagcgagtagataggtaaaaccctgaccccatgtaattagcaaaacatgcatatttatttgcaaacagtaaaacatttgtaaattgggatcaacatgctcaaggggaatgtgtgacttgccttgcttcttcacttggattttctgaactcttttcctcgcgaccgcgatcttccgaaacgacggattctatacgctggcacgcaaaacgaggaaaaacctaataaaaacgaaggaaacagtacctaaaaaataaacaaacatgtagaactcaattttagatgaattttgcaatttgaatggcccaatttggagttcgaatgaattagatatgaattttagaagttttgagccactaaatgaatttctataattattaatgatttattgcgcaattattaaatattttcacaaatgaaaaggactgccgctgacgtcagcaagagagggggccggcgccgacaggcggggcccgtatgtcagcgagacgaggtggcggtccaccgtggaccgggaccacaaggacggtccaccgccggtccacgggttggacggcctagatcggccaaggccgatcggacggctggggacggccgggcggcgcgcagacggccagacaaccggcggcggcggcggcgcaacgcggcgctggcacgggaggtggccggcgaagaggaaaaggaggagggaggcggctcaccgagaggcgcggcgacggagggagcggccgcggaaggaggcggcggcgctccacggggtgaagacgacggcggcgattcggcggtctccaatgaaggtgaaggagcggccggggtatgggggaacgcggcgaacgcagtagaggcggtggtgtggcgcgaggtggcaaggaacagcggtaagaggcggccgaaggcggcaaacgcggcgacgtcctcggcttcgcggtggagatggtgttgctgcggtggaacgggaaaacgaagcagaggccggggtgctacgcgatgcggcgaagccgacggtggcggtggcgtggcttggtggtggctagggcggcggtggcgcgctgccggagtcggcaaagtggcggtggagctcgggttcacggtggaatcggtgcccgggtggtttattgcggaagcggagcggtggacgggatgcgacaaagcgcggcgaggccggcgatgcaagcggcgcggcacggggacggcggtagcggcggcagcggccggctggagtccgccggcgagcggcggcgcttgggctcacggggaggagggggttccgggcatgggggagcttgggagagaggggaaaacggaggaggggagcacgagggtgctttatatagggctcagggatggagatcgtggccgggagaggtgggatcggccggtgacgtggggaggtgaagtggagctcgtggggaggtcaaaccggcgccgtttcttgcggggtgagtgggggaaaaggtggaggacgtggacggggtcgtgtccacgtggttggatgcgagctcgggtgcgggagggcgccggattttgcggcgacgtgggcggcaatggcggttggggttggccggcgagaggtaggaggaggagctgacaggtgggaccgccagtcccacctgtcggccggatggagagagaggagggaaaccgggggacgtaaagtagactttcgcaaggcgcgggccggccgagagagagaggaggcgcgcggcctgcgggagaggaggggaaggcttgggtcaagcccaaaagggaaggatggagaattaaatttgttttctttttatttaattggttaaatgatctttgtgactttaaaattatttcttgagctccgaaaatttgcggaaaaatccggagagtattttagggcacaaagaatattacaaaatattctcggccaatgatttttaaaggaaattttaatttcctctataatttcacttgattaaattgatttaacttttaatataatttcttgaaatgcattattaattgatttttaatcccgaacgaaaatcggggcgttacagctagcccacggagaagactacccaagcctcgatcactcggggtagttcttccttcactccgaaggtggtgaactccaaaccactcacaaacggcgccgggcctcctccacaatctcctcggagaggtcaccgggcaacacctacacaagccgtctaggaggcggcaacctccaagatgaataagtctaggatgcttgccgaggatgatcaagtgccacactagctataacaatgaagcaatgcacttggattggcttaactcactctctaacactagataaactaagtgcacaagggtgtgagagctcttgcaagggttcaagataatgcaatggagtgccaaaaccttacccttgttgctggggagtgggtatatatacccccaaccaccaaaactagccgttggaaccgaaatccccaactttgtgctctgccggtcagaccgccgttgtgaggccggtcagaccggactactttgtaacggctagggcaatcattgagcccactcaacctggccggtctgaccgcagtgtagtggccggtcagaccatccacggctcggtctgaccggttgcggctctggcggctctgtatcgccaccaaaaaccagaccagtgcaacagaccagtggggccggtcagaccggctaacaggcccggtcagaccggcctaaggcccacggtcagaccgcaggtcacttttcagctcaaccgaccgttagtaaaacgacgatatctcttgactcgggtctcggaatttggcgttcttggactttatggaaagattattcaaagggctatccaacccatgaacaatccatccaagaaacacaacttttcttagggagaaagggctcacactccaaaggatactccacaggacataaccacatgaggctacccaaacctataggatttgcccacatctctctttgtttaggacttgagaaaactcaccacacttggctagacaagcccaccaaatacacctacatacatatgaactaatatggcacatgatcatccacaagctcgcttcatagacccctcttgatagtacggcgtctatctagcaaatccggtctacaccaaacaccaagaccgggaaaagactaagaaaacattcttagctacattatacctttgccttgcgccatccatcttggggtcaagtttgagtcgagatcaacacttgtgaccatttgattcaaccatgtttataccaaggtatttaccatcatttgtcaagactttcttctcatcacaagcttgatttcattcttgccaacatggcgatgtccttggcttggtgaccattaacccatggtgtcatccattagcctcatcatagtgggacctattccttttcacatctcaaaggagaacattagtctcaacaaatcggttgtcatccttcacttgatgaccaaccggttgcatatgaaagatatggatatgtttgttgagtattcattaacatcacaagtgtcatatactcgtatgcaagctcaagtgcaaagatccgatataaataataggtgaacaacatggatctaaaacatgcacaataaatgtataggatttgctccccctaagtatatgcatacaaagaaatataaaagagagacaagtgtatgcataagtaaagaagaaccaatggggtttatcctatacacatagagaaggcatatgtagtaatgatgaagataaacaaaaaaacacataccttcatgatctccatgttctcaatgtaaaggagactaaataagataagactcaagtaaacattagtctcactcttatataacaataacattgaaatcatatatatgaacctatcaaaaagtaggagataagaagtgatatatatcgctttatctccatgaatttcatccttgtcatgattaaggtccatcaccaaagaatgcatatctaccacatctcattatcgggaaataaccttgttgaaaacttatgtaaaagagaggttaatcccataaacatcggtttatcatctatcaccaaagtaacaattacacaaattgtttaatccaagatctttcaatattttctctcttttgtgatagataataatccgatataaacaatacaaagagatgagatgaaagataatttcaaatcaaggtagagatcttataatgaacaaaatatagaataagctccccctcaagatgtgtatacatatggatatgaaggaatgcatatgcacataatcaatcaagatcaatgaggaagctcacactatattttggatctacaagatagaccaagttagaatatgtgaagtttaatacatacctcctatcatttttactttcatatccaaataagactagtcaaagaaagactcataaaaatgttagtctcatataattagatttgttattaatcatcgaaaccaaattaaggcacttgaacttacaccgggcttgttgaggaaaggggaaggggcggcgtcaccacaggacccgcgtgcagccggccgacaatctcctccccacacgcgtcgtggccggctgacgagctcctccttccatgccagcaaggttgtcggcaacgtcgctaccgagcagcagcagccgtcacggctgtcctgccgttcccgccgagctcccgccgctcttccgagatcctgccaccccgccactctcgccgtcctgccgctcccgctgagctcccgctaccccgcctgtcccgccgctcccgccgagctcccgccgccccgccgctcccgctgttctatcgctctcgtcgagctcccgccgctctgtgatcccgccgatgttcctacgcgttgccccgccatcctgctgccgccgagctctctccatctcgctcgccgccgagttcatttatttttattgttttactcactgacatgtgggtcctatttaggtttgttttattttagtgccacgtaagcgccacgtcgatgccacatgggaagtcaaccgccacgtaagtgccacgtaggacaaaaccgcctccgaaaccaccgagagaggtgatttgctctggtttttagagaagaaggaggcgttatacccggttttccggctgagggatgttattcacgcaagcgcaagagatgagagaggtaaaatggacttattccttttgtttatctgagatgaatttcagtgagtgagaaccataacgcacatgacaatcgtagaaacaactcaaatactcaatttgacaatttgttccactatggtgaaaaaaatcagcacggtgatttggtaattagagatcaaacagccggaagctttaactcataacaagacaaacgcactgtccttgtacctcacctgaccttctgacggacgaatggccgaatgatcttataactgtactccctccttccgggaaggagatcctttgacgtagaggcttctatgtcagagggacgtctaactccggatcgccattcgtagcgcatccgacattccagaagtgcaacgtacagctataacatgctcggcttctacccattcacaaccgccggaggtccggcggcgccggggaagtccagccgccaaagccgccgctcgacctgtgttcatctctcgctggtggagggcgtcagtgtcgatgtcacccgcatggccgcgtgcggggggggggggggggggggggacacggtggcggtgccaccgcaggcaagggcgaactggattccagagatggagaatgttgcaggtttgatcgagcttcgaattggttggcaatgttgtgtatgtgcaactgtgcgtacctaggggactccgtggctcttgtgcaaaagatgagacttttttttatcagggagctcgacggcagggacgaagcaggcgtggaggactggagggtgctctcgtccaccgcatgcgtgggtcgcgcatgcatctcacttggcggcacgcttggacatgaagcaggacagcgaggctgaagtgttgcgcgccgtgtgtgctgctgcccttcgacctcgcggtggtggtgttgctgccgtcgattcattcccctaccgtgtagctcgttgtcgatgacgactacgggaactccagtttcttgctgaccacgatgaaaagcgacgagtgtggcgcggttgtccaacctcgcaggcggcatccacaagcaccgaggtaggcggaaacatcgcccctgccctcgccggtcgcggcggcggcggctgtgaatggaccgaattgagtagcatactcattgggcttgtaggctgataatggagattggagaacggactgaaacgatttctcccatcagatgtgctacgaacaatgatccagagttggacatcctttgacatagaagcctccacgtcagtggatcttgtacccttcgttacaaagtgaaacaaaaaaaatcctaactataaacttaaacatagctttatagttgatttattttgagatggattcgtagctagtggttgatttattttgagatagagtgtgtagtagtacaagattatgtattgtcttgctccatttaagcatttcataacctgacaagtgctctatggactagcatttcatttaatcaaaatcgggtatgggaactcgtatggtgcatttaagctgctatagtgttatgaactttagtactccctccgtttcgaaatgtttgacactgttgactttttagcacatgtttaaccgttcgtcttattccaaaacttttgtgaaatatgtaaaattatatgcctacataaaaatatatttaataatgaatcaaatgataggaaaagaattaataattacttaaattttttgaataagacgaacggtcaaacatgtgctaaaaagtcaacggcgtcaaacatttcgaaacggagggagtactatgatactacaagccctttatttcagagatgacaagttgttcatgttcctagcatttttctttgcagaaagtcaaaacaggaggtgtgcatggcatcatttcagcaatgacaagttgtatatatttttccaatcaacctactacgggatcacagatgacaggttgaacaaaaaatggaaccttaagattatcaactaaaatgttttatttctcgaactagcaagtgagaatgcataggaagaattaaatataatttcaataactaaaataaaggcacccaagtccaaagtcaaaaagaactcgaaacctcaatggtgggggtgcatacccacacatcccaccggcggaggtagaatcagttcctcacttctcaaacaagcaagatgggcacttgatttttcctgtcactacttatctcatgattatcttaggtggacttatctgcttttgtagatgagcttgtttcatgctcaagtatgttggtagcgtcatggaattccatatggagcgcatgaaattagtatgtacaagaactctattatcttattagagaccctttaaacatgacaataccactaattgatggtactccatgaatcatacaagcttacatacaacagtttgtttgatacatgaatggcttttacagcatatctaagaatccttttatattgatcaaatgggccaacaattaacgtaaatgataatctcatcctaatatatgccatagaaaatccagcaagtctgcataaagtactgcatgctttcctcaatttcattgaggaaatttattaatatatccaactaatataaaacttagtatcagtctccaacaaatacaaaaaagtatatctaaaggtgaagctaaatggaattataagtataccaagctaaatggagctcgccgataaatgaaaatgcttatcaactctataaatagttagaattagccagaataagaccggaagaacctcatggatggtaggcaagtcacttcttccaggactacatcacgaggcttcataaattgacagaacagaatcatctcatcatccagtagcagaaaactggatgtcagcatctcgggaggcctttctgagcttcaataccctgcgcctgaactttgcctgctcaaggccatccatcgaaggcacaatagtcatcatctctaacattggtgtgttcttgagcagaagcttaacaagatccaatccactcttgctctcatcgatgtacaccatcctaactgccctgagatgcctcagcacgacccctttacctcccataacccaatggtttgctccatcatcgctaccccatctccgcttgcattgcgatggctgcaagaattagcaaccacaccatcagcattgctaccatgttttgcagaaaaaaaaaatctagaacagcgaaagaattatatctcaccacaacagacacagagagttcttccacattctgacaatttgcgagcaatggggcaatggatgaagcaccttcttctctcctctctattatacatgacaactgcctcactttgtttagccgcaccttggaccactcctcaggacgtgcaaattgcttcaagttattcacatatcaataattagattcctcaaaaaaaaaaactttttcaccagatcaagattcaagagtatgtcatatacctcaatgcaccaaggtgaaagcataaggctctgtacattcccaaccaaagaaagaagctctctgagattaggctcctggagcttgacctgcggcttcttgatggcaagaacgacctcttctaatgaatcgacattgtctataatgtgtctggttgccattgcacccaagtagtggagggtgcgcaacgctggcatgtcagagaaggcaacagaagactgcggagtccaagaacaatccgtgatggcaagcgagcaaagctgcgttgtgccggctaggcagagtgcaccaatgcggcattgttcaaggatcaggtagcggagctgtttgcagtgcgagaagaggtctgcaaagaagtcgtcgccggcaagcggaatggaggcgaggtggaggcgggacaagcgggtgagcgagcagagggacggaagagggtgggcgtagtggtcgaggcgaagggtcaaggatgtgaggttggtgcaggcgattagggaaggcgggaggagggcgaggcgggagcgggggaggtgcagctccaactgctcgaccccgcgcgcggcggcggcggcgagccaggaggcgaggtggtcggcggcggaggcggcgaaggcctggtcgaagaggccgtcgaggccgaggcggaggcggcggagcgggtggtgcggcctcgagagcgcggccgtggcggcggccgcgaatgccgccctgcggcgcggcgcggccgggaacgccgcggcgaagtcgaggtccagcgccggcgcggccgccgcgacgccgcgccaccggcgggagatggccgacgcggcgaccgccgacctgaagggcagcttggacacgatcagcccgagcaccgcctcggggaactgctcgaacgggtcgccacctccacctccatctcccccgtccccgccgccgccgccggtggtggcgtacgcgcgggcgtaggtgtagccggcggcgtggtggggtatcaggtgcttggtgcgcatggctgatctcccaaaccccccggccgcctccgggccggctcttcgccccgcgattcgcaggaaggtgtacttttttttttctccccctggaatcggaagcccacgcgcccacgcgacgcgacgctggcggcgagaaggaaaagtacagcgcaaacaggggaaaggaaccgaaagcgcaggcacgcaggccgcagccgacccgcggttttgatggctcctttccgcgggtgcgaatcgcgaggcggccgccgcgtgcctcgttaacccgcgataccgtgggcgtgggcgcgtggcccctgcagctgccgtcaccgccgtgccgtggagacgactcggcgaggaggacggtgccccgcgcggtcgcatgaacgagcagatgggttgtgaacgagtagatgggtttttggctcgatcggccctgtgtgccgcgcgaggccgagtggagcgggggtggtgcggtgcgcgcggtggggttttttggctccgcgtggtgggtttgccgctcgctgcaggcttttccgtgtcgtgagtcgtgagtcgtgacgagcgtggccgcttggggagtttgccaagtggttttggtgacatctggggccttttggcggacttgggggtcggtcgcgctgcccacgtttggttctgacgtgggttttggttcggtttctggtttggacttctggggcggacaagtggatcgcgaaccgaacttctctgtacgagagggaatccctttgccttcaatgatcagtaatcccttccctccgtttttactccatggcagggcaggtgatgaaacagtagagcatcccattgtccatggaccacggcagtcgtacgaaagattggagaaatcgtgcagttgatctggcgtcagagagcagaaagtgcgcttgtctattgttgtagtaattgcctgacatattagcctgctgtagtaacgctgcaagatcattccgtattgaaatactcttttatctctccgtcccaaaataaagtaaatataagtaggaaaaatatgtggaagccataaaataagtgaaaacatgtgaaaatcatatctcaaagttctctaaatttatatatagaaaaactagaacatatataggcatgaaatatattcataccaaatctcaaatctaaactaaatttcatttgagagaataaaaaaagacaaattacaggtgaattcacctaacatttttgttattttttttactcacaaataaagataagtttagacaactctattatcagatgagatactccctccatcccagtatatttgacgttttacttcatgtccattgtcctacaatgcttgacgttttagcaaggagcataaatgtggggccgcatagcagctgacggagcgtggggctcctcaccgggagaccgcgcgggcccccctttgcctgttcggccgggggcgctaggtgaggttctaagcactcgatctgtggaatgtttcgcgagagagcaaatgcgcaagacacgggcgatgtagacaggttcgggccgctgagaagcgtaataccctactcctgtgttctggtggatctgtgtatgaaggagttacaaagagctggagagcaagagagttcaaactctagaaaccctcttcctctttctctcctctacgagctcaggtcttctcccccctctttcccccgctccccctttcttaagtgggcaaggtcctccttttatatctcaaggggatctcacatgcaccacttctacctactcttcttttgggtggggactcaccctatcttcccaaaaaagaaaaaactggcttgcgccttcgcctggaagctaaatcacagcttgtctttgagtgaggcccagcgtcatcactcgcctgacaccggggatctccctgttactccctcattaatgggcggagatttgccatggctgttgtccgaatgaccctctgatgggatgggccatacctacctccactccgccggaagcaggcgcaacgtgggagcacggttgtctgccgatgacgtgaccggcgtcagaccagtcacaaaccggtcattcttgtctaccacgcgtcagtttagcatgccacacgtcagccattcttcataaaatgacttccttgtaatggttgcgatgaagcctggtatgaatctagccgggactgacgtgctaactccaggagtcagcacgccggctccggctagggacgagtgcctagaggctctcatcattccgacgggacggggcgaggcgtgcgaaaggccgcctgttgccacctaacccgcgatctgaccggtctgtgaccggtcacacactgtgacctgtcacggaccgaacgagtgtgctgcgctgcattaaatgcggcatggggcgctcgtccaacccgcaataaacgcggttaggtgagcgccgctgtgctcacctaacccacacacgtggcgccaaacccacagggggtcggggcgccccagccctcggggccgaaacgggagcggcccgacccctcggggagacagagggaggggcggccacatcaccctcgggcccgacccccccgagggggtcaggccacgtgggtgactgcagctgcctcaaacctctagtcaagatacccccggtcccatatcaccgacagcagcgtacaattcaaattttactaaccgggttatcaagaacaacagctcatccatgattccaccgtggcaggaacggcatgtgtattcttggtttgaaatgactgctcatcatggttattcaaagtacctagtactccagttagggctatatagtaattttcacctaagctagaacgccccaggccgagtttagttccaatcttcttcttcaaactttcaacttttccatcacatcaaaactttcctatacacaaactttcaactttttcgtcgcatcgttacaatttcaaccaaacttccaattttggcgttaactaaacacaccctgggacaaagggagtacaaacatagtactagtacttcactcttgacagggagtactgatcttgccagtttctcacctgcctccttggctccttccgttttgaatccttgttcagtcagatcttgtgttctggctctgaatcatgtaatcagtaccatgcaaacaatgcaaatgaaagcaagcaacagctcctattgaacactgcaaaccagtagaactgatgtgctttgcatggtatacagaaagatccacttggtacatcagtttaacgatcaactaaacagtactacatgaatgaatgaggctatcaaacgttacaagaagcaggtgacatttatttctctcctttcagttttcctctctttacaaatgaatgtgactatgactatcgagaaattatgtacctggtttgctaacttatcagatacaacaacgtagcaagctacggtttttaaacaaactgaggtttccacaaaaacaagagaaaacaacatcccagctgcacctaaagttagacatgacatctcgtatcatcaccaccaatgatcctcttgttattctgagataccaagagagtggtcgattccttgcacctggaccatctgggtgtacttctctcctctttgttccagaacctggcaaccaccatcttcaggaaagccctgaagtcaacaacaaatgaagttatgacctccctgcacaagattgatacgtgttattatttattgatagcacgagtgtaccatcattttggcagcatgataatgttatcagaaccctgggataatttggccatagtaagaactaaaaatacatcaattgaattcttctggattggtcataaggtctataagttcaattcctctcaacacccaacaaaagatattaaatttaaacatctttgataaagtcgcaacacacaataacaagaaaatattactgcccaccaaactaaggacctaaacattgcctcagccattcaatgatcttgttttatgtctaatagtaagttaggccaagtttgctgtgcctttaaagaaccttatgtctgcacagtaatgccttagagctaccctgtaccaacaccgtcatccatttgatgcttagtgacaaataagggtaccaagagttgatgacctaacccaggataggtccaaaggttgcgggcgagtgactcacattgtactaatgacttttggccttttaccaaaatacccccaaacattcaggactggtaaaataccacaaaaatagtttagaccatttctacaaaaccacgtaggatcgtttttaaccctcctgcttcattttctctagtgagtacttttcctccccctttatctctccaacccttcctccctcaacaaaaagcagctggaaatcatctttagccaccactatccctccctgcagaccagcacactgtctgctgcctccttactttaatcaaattctaccacatccagcacagaatcacacatgcacatatatgtgaatatggtagttgagttctgaacttcttatttaaacagcatggaccaaattaaacaggaagcattattctgaattgaatcgagcttccaacaagtaccagtttgagcaggattgaaataaaaatatatcatatttaaatcagattttaagccgaagagaatattggatgtagcagactactggatgtttgggtgtgattttggcaaaacacatagtgatataagaaggctttatgttatcttatgtgcttgttgccttgttatcggtcttagaccaggggtgcgacactaaccctcatcaagctgacagtttgacagcacctagagcttctccctaacgcggtagagagattctgaggcttaatttattgaacacttggtttctcattgcttggttaaaagagacatggtcccatccttgtgaaaagagacatgagaaacttatctccaatattacggaaagagatggtattgaccaatataatcttatctctaaagtcgagtagtcctcgtggtgttaaagtaactgcatgaaatgtagtacctctgtcccaaaataattgtaattctaagttgtttagcatatattaaggtttgaggagaaagactatggtgtccctcattaaatggtgtatatgcaagagcgggagggtggttgagggtagaataggaagaaatttgaataagaagtgattgatgggacaattagtactctattgtgacaactattttggaacaaatttgaatcctagaaataaaattattatgggacggaggtagtaataatgtatgtggtgctacagtaatcccatggtcagaaatcatgctaagacattgggctatgacactttatgcgccatctggcttaacatgtcgtaaggtatttagatattaagagtgttaaggttgcaaattctacacgatttaaaaagttgtgtaaactaaacaaaacagtaaaaagagaatggataaaaagaaacatgttcaaggattttttttttaaaaaaagaaacatgttggatgggcaacaaaaggttatatcagttggaactagtggagattatccaaggtaggtatatattatcctgccggacaatgtgtaatcctcttaataaaatcgtatttgtaaatagaaggctctcattaccagcttggaagaaggaatttagatgcaactctgccatggttggttgttagggcaagtccagctgtaactttttgtctctttggtcaatagcttctattagttttatgttgtctaaagaactcatgtatcctcagcttttgtgtaaatattcatttatatgttttgatatattaacagttaagccgttgaggcctcttctcctgttttccttaaaaaaaggaccgcattcaatttcacactgaattcactgaaagcagtcaaacaagaaaaatgttctccagtgtgggcatgtccagatcagtatgaacccatggccataaacagctcatgcattgccagttttgaagctaactagaaaatcgagcacactacagagttcatgagatcgattcatcatgggcagtcgaatttgcatattatccgaacgagagttaggaatgacaactgcagatagtaaaatcctattgaaacacagcatcggataactactaaaaacaaaacttgcatgcttctccagataaagaacaagaaatacttacagtggtgagcaaggcgaacggcccccattgacatagtacacaaacaagtatgaatcataatgctgccctcttatgtaatagaaatgtggaagtcgtctgacaagcttaaatagcatcttattgtaaaagctgatagcaggttggttatatgagatgacatgcaaatagacacccctgcaatttgagatacttgcagcatatttaatcacctctcggaccagtgaggatgctgcaagcgcgaatgcttgtgaggattaatcagatcataatcacaaactgtaaaactaagttggacgagcaggtaacaacctatgccgaggtttctgtagctctccactacaccgagcgtcaggatatacagaagtgtcagatctttgcgtgagctgttatacctaaacaagtcctcaatctgcaagccaaattattagttccaccgagctcatcagtaagatcgatgcaatcttgcatgtcatacctcgctatcttgtgctgcaattattctcgtggttacaaagcctatcagctcatctctgcggtcatctgatctgctggtatccacagcaccccaagaaataataccattgccgttgaccacgttcaagaagaactctctctcgtatctgagcaaaacaaatacaagaattaagggattaattggtccaaaaaaaaggaaaaatccaccaataggctgcaacacttctacaactgaacatgaagggtgatgcgaccgtattcataagcaagaacagcaaaggagggatcagggagcatccatttgcagtagtcaccttatgggaaacagcgcgaggtgaatattctcaagaacctcgagatcggaaggctggataggacgatacgctatggtggggtagatttccgatcttgggtccaacatgagaagccccggtaacgacgacgactaaccagagcctccgccacgaggtccgcggcgcgttgcgcggggggagaggagcagcttccgggcgtcgaggcgcggcgccgcgtcggtgcggttgacccgcgccacagccgaatcggcggacccagcgctcggtgcagcgcggcgaggaagagaggcagtacggcgccgggagaccgatcgatgcgtgacccggagagaaacgggagagagatgcaggggaaggttctgggtggagaagggagggaggggaggggaggtggaccagcggcggcggcgaccggaaggatgagaggaggaagaaagaggaagctgatcggctgatttggattttgattagttgaagctaaactgtcgaggggatttcttattttaatccaccaaaaataaggtgctctttctctttaatcaccggtgtgtgaattgtgattgaaagatgccgccagccagccacgagaccattctagaggtgatatgtctcgatatcaacaggctaaacataataaatatttttttatcaacaatagcaataaaactatataggatgaataatttacctctaatccgttttgtttgatttcgactggattgcagaaattaagaaatgacatagttttatcaatttgttttttcattgggtataatttaaataatgcttcctctatttataaatatgtaaggttcataataatatttgattaagggtttgttcactttgatgttaaaattaacctgccaaattttggcaatattggtaatactaaaatttagtatgtacagagtagaagttagcctaaatcatttatttggtttattacattcatgcataatatatatgtaaaaataacatgttttagtattttctaagaacatgttagtcattttctcaataaagatcggttaccagttacattatgtttggtttcgtacttctatgtactctgttcatgtgatgctacaaccagggtttgcatattcaattattcatcctgtccatcttaaattgagggtgttaggaactttccttcttggattgaggagttagaaagaaaatataatagacggtataggaacctatatttgcagcatgtgagtatatgtttaaaattattatgtatcatactaaaatataagtattttgaaaaaaatgcgaggttttgtgaaacatcttagcctaaaagctattgttccttgaaataaattgtaaaaaatgaggttttgtgttatggatatcaaaatatatggttttgtgaaatttgcttgtaattttgtatagatggttttgttaacatggtattgtctttttcttaaagaaaatgtattgtctggttacatgggagtggccctggcaccctcatcctatttgacccaagggaacacaggaaaacttattaggaaacccataaaggttggcgggctgggcggccagggagcgatgccacgtcagcgttttgctacagtagctactgtgcgcgtgggttggattttttcggaaaagcccttccatttttggtaatcaggtataggcccctcacgtcatgtgtttgaagagaaaaaatcgcgtacaggggcttcgttgtgatatgtggaagatgagaggctttttagcaaaacaacatccactaccgcatacctcttcaagccctagccgccgccagccgcttcctcttcctatctctctctcccgtcccgcgccaccaccgagcgccagcgccgccgtcgccgcctccgcctctgcctccccctcgccccatccccgtcgccgagcgccgccaccaccccctcgcgccgccgcttccactcccgccgccgtcgccgccccctcaaaccctagccgccgccacccgctcgctctccctctcccgcgccgctaccgagcgccgccgcctccgcctcccccttgcgccgtccccgtcgaccggcaccgccaccaccccctcgcgccgccgccgccgccttcccatcgcgctgccacctccgcctctcgccgtccccatcgacggccggctccggctccggctccccctcacgccgtcgccgtcgccgagtgcagccgtctctgcctccgccaccgccatcgccgtcgccgagcgccgccgctgccgctccctccttgtgtaaatgcggccgatttgaggacggggatagggttttcgggtggatttgtgagggggatagattagagtttctggttttctggtttggtcatcggaggagatgagctcgtcgacggcggccagcatcgggccgccgcagccgccgccgccccccacgtctcccgaggaaggtgggtggctaggtttgtttgccgcttcgcttcgcggtttgctttactttccttctcgtttggttgatgactcgatctgctactggtgcagagaagtgcctcaacttggagctctggcacgcctgctccagcccgctcgtctgcctcccctccgtcggcacgcgcgtcgtctacttcccgcaaggccacagcgagcaggtgtcgtggctcagtgcaatgggatgctcacttctggtcagcatggtgtcgctcgtctgtctcgtcctgctccaagtaatcttctgttctctgagtgtcccccaattgaatgtttgcagcttttttttcctgattatatgtgtgcgctcacgttctgtttctctcatttgcattttacagtccaggggaaaccatcaaagaccatggtggattgccttgccatcttcgtggtaagtatggagttttcagtggttaaaagtttttattagtacaaaagccaaacaagaaaaaaagattgttgactgtaatttactcgagtctgaatgtagttgtctgctatggtaccagaaccagcatagtataccatgggtaatgcagtttgaaattacagtacagcaaagtaatttaggtgtccgttgaattccttaattgtagactaacaaatgtccacatctgtagtaactgaatatcacatcgcatttgtgttaatatatattttatattgtgattgggtaaaaaaagagctttacgtaaggaattagatggtgaggctgacttcgaatggatcgagtactgtggtttttatttgtacgttttttgtgattttcttttgctatggcttccatttgggtgcagattttgagtcctattgtttggattagattgttcaaaatggatattccaaatggataggttggctgggattattagaaatgtagtttcagatcaagctaatcctgaaaattccacgaggtgtgatttatgtctttacaaatttcagacaaattgatactctcttcgttatatttttcctgtgcaggtcatgagacaatgcacagctcggttgatgaagccctcttgctaaatgtaccgcataatcaaatcaagatgcaccttgttttttgtttttttttgttttttgtttgcataagaactttcatttgagctttcagtgtatactagatcgactcccgccgcaagcttgtcccattgaatagtgatccaccataaccattcaccaattcggttgcaaatctgaaattctatgatcttagattcttggtacagctggtgcttcttctccaagactctcgccgagcgcgaggcgttctattacgtggttgacaacgctgctgtcatggacttcatcactgtgaacaccagcggctccatcctcatcaacatgctcaaggtagccccttttccttctctcaagtctcactcctaattaattagaagaactctcttttgttacactcttctgaatattcaaagaactcgacaataattaaacagtatagatgcagaagctagaaaacatggtggcttcatgagattgataattactctatgatattgtacattagagattttactttagcaatgtacaacactaatggtctatttatttgcctgtagcagtgaaatatctttgaatattttatcgattactctggatcatgttgaaggatatcttgaatcggctgcaaagacaataatttcgtgacgactttgttcaggtggggtgcagagtactacattaaagtggatgttgatttacatgtaaatttatatgtgtgcgaaatgttgccctctgatctaacatcataccccccttcttttaagtcttacttttcctacttaaatttgacctattcagacatttcatttgcattgaatttctgctaagtatttggcatacaaattgtacactcaaagttgataaaatctcatgttgtattttagagatgatgcttctgaagctaaatttcaaactccatacactttaaaattctatctcaactatagtgaggctctaaaaaccagatcgataaatgttgcagcaactcttcgaaacatgctaagcatcggtcaaaggctcaagcttacattggttgcatgaaatctggtccagtcttagctcataaaaaagtttccctgttgactattgctgttgtgttttccctgatatttttaactcctcaccaaatgccatatttcccttagcctgagtataggaaatttggtgaatgggggaacaggtgcatttggtttacaacaattcagttctctgtaatctccaaggatctagcttcttacatatcaattcagccagtaaggtatttcttcaaacatggttttttatctacacgatatttttgttttttttctaacatttacccatcattgaccaagaacaatggtgtcatttcaggctttttctctaacaagagtctccctgttttgctgtctggctttgtatatctactagctttacctgtatacatatatgcattgggggttagctcagttttctctcacatgctttagtgttactagcacatggtagtatttttcataggtatgtcaacaaagtagtttgtatgtatatctttaaattgcttacttaacaaagatgcgaagaatattgctaatgcttccctggtcactaggaaattatgaaacctctgtccatagacttgctagctaatactggatcactagacctcattggcgggagggggaggagaggaggggtttggcttccccccacaatttgagattgttatacattgtggcttaaagattaaatcaacaccactcttaacaaattaggatcgctagctccattaccaaatgatccattctacctcataaaacattctttctcccctaatggtttcaattggaagaaatttctttcctttaccagctatttgtgtcatttatagttggtcgagttctcatttcctttttgattgagtccattgttctaatcatcttttgttgtgtagtggccaaactatctgtgttggattgttatgggagtatattataggtcattttctatcttcaacagctcttgtatcattcatttgttgctccaaaacacatgggtatattgcttcagcattctataatgcaccccaggaggtgcttgccttatgttctcttcacaatttttttaattttggtttgtcgtgtactctatgtacttccctcttgtgccttgatatatatccggcggtctcaatattattgggaacttgtcattgtggttggcagattcatctttgaaggagctgcaggttggactaattgtttccatccttttttactttaaataaattttttgctttattgctaagcagattaatatttcatttgcatatgcatatattctttatgtatttatgtggcccatctttcttttagtgttggtttgccagttgtttgtgtcacaccataattctcatattaagatataataattgttcgtgcgatttcaatcaaaggcatatttaaaaatgatatgagaattgttcattatatcgatgtttatttaagggttgtgcaatttaagtcacttattattgtacaaccatctagcacaaacgtttttttgtattttaagaacaattgatctaatgtaaataatttcatacaggttgttctatatgtgttccaactgattcacttgtagagttaatacaaatattggttgaaatgtacacacatatacgacattggtgcccatctcttctatcaccatctgcgaggcctcactcaaggagatacaccatcagaattttgtgagttcccctttaatatttgagtttgttacttgaccctgcaagctacgatgatcacaaaattgtgtttattcaacaatagcttaaatttcaggactagaacatttcttttcatcgattatgtgcatacctaattgtttgctcgaatgtgaaagtaatgtcgtacgatcttgtttcctaggcttttttcatttaaaaaaaagatttgagcatcccatgttcttggatatgtcgagaagtttcatctttcttcccatgtacagagtacaaacactttctgtttccccttgactattctaaaaaaacaaatcgggatatggcttttattattgtgcgcctgtttcaagtgtgataggagatcttatattgtgaaaacttatttcaggtgaggtagaacgggattgttcattatggaagattagcactacactcttgtttgctaggtaaattttttccctactctcttttcatccttaagatgtgtattattgcctattcagacattcatctatttgatattaattttatgattgatttttgtctggtgttacacataagatgatgatgatatacagtcaaaggcatacctgatgtgatttttttattttcctaggcatatagatgattaaagtcaggtcttaaattcctgacaattttaatgtatatgcttctcaaaagaatttctcagcattctgtacattttcttcttgacttaaaaatactaatgagttacatgcaaattttctttttagcttaaaaaggatattgagctaatgatagtgatgaccaggtgggtagtaacttattgtcttgtcgggaagatttgaaaatattattatgctatatatgttgtatattatcggagccaaccatttacttataagtgattatggctggctgcagtgttccttttgaacatttatgtgaattttgaagcctggatacattatgaaatccgaatatctccttttcttttcattggaaaaaaaatttgtatgcaactttttttctgagcaattacttcctgttgtagaggctgcagagtttgaacttgttgagcccatctaaatactctaaaggagatgctgaaagaggaggtggatgagagcactaaaagaaagtttgatagttgtgggttgttctttggtttactatggttaaaaaacaaactatgcagttcagtttctgatagtatttgtcttccctagctatttagaatgtgtaaagcatgtttattatcttagtcttagctttccatttctgattttggggctatcatgtattctaattcccatttctcctttggttgggaactctgtgatgtgaataggctttggtactaaatttttatgttgctttaactatagattgataattgaactttgagattcatctgtattgcaaatatcgctttggtattactgttctgactctgattaagtttgcaaaatgatgattctcattgtatgttgtgcaggagctatctaaggaaaaagaataaataagatcttatcctcttcaacatgatgctatcatccttggtcatcaggaaaaactcagaagaccatggaccactcctgccactcgttgtaagaaagatgatcataaatccaatctgatattagttctgtaaacctaaatttttgtcctaatctataataccaacaaatttaggtcgacaaaaaaaatcaatacgaagagatcatgcttaattttataaatggctgacctcagggaaaaatgttgcgaggattggggaaaaattgttgcacatcaatctttcttcatgacgaaaatgatgcccacctatcttgcttacaaaatgatatattttacgattggtgtagggtcatatgcattatcacttcttctcaattttatgctgtttttttcatatgatcagagataaattgtgcctctgttatgataggatacatacattttaatattagttatacactcagcaatatttattgtttcaaacatagtctctcagattagcgctacactttcctatgattccattgctttgttcgcctttgattaattattgtttgttcgatcatattggttgacgtggaatacaaaacagtcaggggtcttctttgtgaaatgagttcattcgaacacagcctaattgggttacagttctttgatgggattcaggaaggcacatatgaatggtgcatagaatttatctaatttatctaaatgctccaaaacactactttgtgcaatattttttggtacagcaccaattctcctttatgttcaccgttcttcttgttgagcaagcatttagaggtgccatctcccagcttcgaagctaatttttgatgcaaggtttggctcgtatcaattttcattgtgggggggggggggggggggggaaggtttgttcgcatttgatttaggcaaatggcattctcatttttaccattctactgcctccaaaccccagttacaagaacaaaaatcaaatgataaaaatgaaatattgagattaagagcattgcaaataatattctttctaaaaatagatgcaattcttctgagtccatgtgatgaaccttttggagtggttaggatctgatcatgagaattgtcagttatacacctatttaagaaatctctcaaaacgtgtatgattaatgtaacgagttaaataatttatcccgatgcctaatctaatcctttactcaattatcttgcaggcaatcttgatcagttaattgctccagtttaaagacttttttcactataggcaggtgagactgaagattgtttgtcagttgaaactgcgctgtgtagacagtagcccttgcttgagaaatgatggctatgactttgaccctttgatcatatggaacaacaacacttcagtatgcaagaagctcttggaagtggccatttacatagtgcaaaatatccatgaattactattatcccttttatccatcagaattatgttacttgtcgtctatggttttaataacaccaaattttggtgtaaacatggtatctaaacactgttgagcgatccagctatttagcacttggaaaatctaccactaagttatgtcgacaattttttttcttatttacatcctaagcttctaccaacaacataaaatatatacatttcatctctgtgtatctggctctatgaactttattgccctcttaattctttctattgcaccgttcatgctacaataactcgataattcactaccatcatataccatacatatctaattatatgcaaacgctaacacactgcatcctgtcattcctatttaattctctataccatttttctaatacatataactggcatcaaacttcacacttccttaccgtactgacaaatgcgtactgtatagaacaagctgtgcacatgccttaccgtactgacaaatgcatgtagaacaagctgtgcacaggaggcgcgcaaaggcgcgccccatcctctagttcatgtagaagcccgttaatctagtactaacaacatgggaccgatgcatgaggtactacttgcgtgctcttcttggcttcatttgggttggggactgtgtttggagcaaaacgatacatggattaacgcataactaactatatattagctaaaaaatttaaaatgattaatataatttctttacaactttactatagattttttttaaaaaacatcgttaacagtttagaaaacacgcacgtgaaaaatgaagaagagaaattagcaatgtggaaaaaagagttaattggatccattccattataaattctttagttttgaaatatgacattactattcacttatttgaagtgatgccattagattgaaggtatttgaaatatgccgctacatacccttttaacacatttaacaaaaactttaaaccaaattgccctcgtccttttcctttgtctcctcccatctctcctgttcatctccttgatttcttccttcctatttttcgcctgtgaatctcggctaaggacacccccttcacctttactccggcgcggtccttcaaatcccgcgaggaggagatgaacgtggcgtcgagggctgggtcgaggcggtactatggttcgaccctgtgaagtggacgacgccgagggactagaggccctggcgttggagctcagccatagccgagggaccgtgatggtcgtcgtcctcagcggggaaaccagagctcggacgctcagtagcgaggtgcagggcttatagtggctgggtagacataggcttggtggatccatggcagcagagatgaataggatagatgggaggagacagaggaaggagacaatgataatttggtacaaattttttgttcaatgcatcaaaggggtatacagtggtatatttcgaatatatgaaaaaatgtaatggcatgatttcaaataagtgtacagtaatggcatattttaaaactgaaaaatttataatagcataaatctaattaacccgtaaaaaagacagctcaagaatacgtgagaacacatgagacgcctcttcacttgacacttgatacgtgcgcccttcaacggtcatcatggcgaagccgatctcatctcaacattttttcaagtctaaaatctccgatcacgctaacactgcataacgaggggttactatagaagctaaggccaccacttcataggttatagcagacattctttgctcttgcagttgatttccttgataataaagtaatcagagagaatgtattggaagagggttattcccaatatccatataagatttttatttcttttacatagcctaggagtagttgatttattgttttagaattaatcgcaacggcaaaaatggttcgtcatctctaaaatcaaagcaagcccatatgtctcaaaatttttttggagaaatttaaatctacaacttagaaaatatgctgataacaaaatatcataaattatttatgtttttaagaggaaaaaaatataatatcttcatctgacttacacttcagcgataatgtttagacaattgatcaaatgtttagccactggatggatagtcacaccatgtgtcctttttatgcgcaggaggtggaaacaactcaccatatattggtggagtgtatcttcacgacaagtttggtataagttgctgttcagtgtcaggttggcatccctatcaccccgctgacaagcttcgtttccaatttggtcggagttttctcgccagcagctgtaagtcacaacagaaagggggtttgactccccttggctacctcatcctcatctttacctggcacccgtgactagaaagaaacgctctggtcttcgacggaatctttctacggtggagatggttgttgatcacatcgtgcaagaagagaagctttgggttgcggcgttgcctaatccactaggagacttttttttttgcactagtgaatagccttttttcctttcctcgttgttctacaagttcggtttcttccttagttagtatagtgtgccctttctctcctccataactttccatgatatgcattataaaatttctcttttttctaatatatcgatgtgtttttgcgtgttaaaaaaagtttcgacatggagaccttttttttcaatcggtactgcagtagctctttggttaagtattggagcaacactacccatcgaaaaaaattttaggaccgtttttcttccatccaaagcgctgccgtcgcagccaccggtcgggtcgagccgcgagtcatctctgcataacccccgtgactgactggttggggttggaccggttttcatctgttcttgtcctgagaggaggcgagcagaaggctcgtgcgaccgccacgagaagggcgacgacggcggcgggatcaaggtcactctcgactcgacgacgacggcttgctcgacggcggcggctggcggctcatccccaaaccctaggtccgtcccaacactccaagaagccggcgcgcggcggcagcgggatcagggtcgctctcaacggcgacggcggctggcggcttgctcgatgatggcggctggtggctcatcctcaaaccctatgtcgagagaagcctcgtcctcggcggccgccgcggcggcgggggtggctgtgagggatgttggggatgacaagcccttgccgtcggcggaggttgacatcacctactgggcggcgcaggaagaggcggctgcgctgcttgagtcgatggccgcgagggctcgtggggaggacgacctaccggaggagcagctgcaagccaataaccaactacaggaagacgaggtaatgcttagtactagtactagttactagttcgcccattgcactagaatgtgtgtataagttcccaaacagtatcagtatgcagaaccatcaatcatgcttatggtgaacaaatttcgaagttactgtttatttgtgcgaagatttattccggatgtactgtgcgcagtagtactcaagtctcctaagacagatattgcagtgaaattacacctatataacattctggtttctctcggaggtcctaaaatctgcccagcagttctgatgagcgcatcactttcaattaggataccaaaatatggagatatatttatcaggaaagattaggatcactcaacttatacgtagctattgcctggcgtaatggattagcacattggaatactgccagttcaaatagcctaagtagtgttatgtttaggtaatagcactgcaagctatttttggtgatgatatggtgatcttggagaataaggacaatcttcgatttattcaggtaacataagtttcttttgaatcttctgttgtcctcaacttctatcttttgagaagattgttcatgaattattccacagatttttgtgcattatacacttcctgatagtatccgtgtgttcttgaatcttcgtcgaagtggagctatggttggaactgatgatagtgaaaaccacaatggcggagaactctatcatcttgcaggttgcagcatttgccacctgttgtgctaacatgtttgttgccacggtcatatccaagtatatgtgctacatattttaccatttcagctaaatggttggatgaaccaaaggtctcatacctgtgtgctgcgcttgatgaggtttggacagagcttccagggcaagaagtcatatacagatgggtggattggctgaatagctcttcgtggtcttccattgctttgaatgatgaaatagtgttagatccagataaaacattaaaaattggagatgaacgagctatcgcgagaagaattttagttgagtctactattcctcttatgcagagttacagtgagaagagatctcataagatatttttggaaagccttctcgtgtgtggaatttgtctaagtgaggatgttggtaattctcttgaactattaacctagttgctttgtcatttgttacttctgctacatttttttaaaagtttctattattgcactttacaaggcagaaatttcatcaagctcccatgccatcattccttttgtttgaagtgtatggagtctcactgcaaaatccatgtgaaagaagggaatttaatgcagctggcatgtcctgatacaaattgccgcaatccacttccgccatccgtattgaaaagccttctacgagatgatggatatgcacaatgggaatcatttgctctacagaaactgttagatgcaatgcctgatctagtttactgccccaggtgttctgctgcttgcttggaagttgacaatgatgctcaatgcccgggttgtttttttaccttctgcactttgtgcaaacgccgccgccatgtgggggatacatgtattactcctgaagaaaaaatacgcattttgaaggtaacaatagcataatctgttaagaatttatcattgttgtgaaatccagtaatactgtatgcattgagtatctatagattttttttatggttgttaattatcatatggagctcactttatatggtcatatggttgcagtgcttatctacagtagttcaaagtattgtaaaggttcccatgtaataattctgtttgaatttatttcatgtatgctgctttcctttcacaagatgttcacatgaacttttgtgggtgcatgagtttattattgtactagggcagatctttctcagtgacaacatgcttatgtatctgatttaataatgaaagggcctgacaaggatgtcatctatgcgagtaggccccagaccccaagttgtttccccggtaattagctagtgttagtgagctaaccagggtacacaaggcattccattctgcccactgcctcttctttcttttgtttcctttttctttccctacaggattgctttaagctaattgtaatgttttttcccttctgctataacatacacacagctatgctgtttttttcataaaggaaaaaaatgaagaatgaaaatgccatggtctatttgatggtgtgaatcaaatttcctacatcctttttttaaatctatttaatgttgttcactggagtactttataacaggaacgacagaaattgtattccataccagaggaacaattgttgaaagaaaagagggaaatagacgagttgataaatatccaggaagcacttcgtgattctaagcaatgccctcgttgtaagatggctatctcaaaaattgaaggttgcaacaagatgacatgtgggaactgtgggagattcttctgctatcgttgtaacaaagcaattggaggatatgatcatttctggtatgctgttgattaatgtgcaaatatttcatattcgattttctgcatattgagctagcaactgaagttattcctaccgaaggaatggaaactgtgatatgtttgagagggaacaagatgaaaacccacagcagcaggatgatgaaaattttggtggcgaccctgacgaagatgctgaactcttagaacctgaatgggtgctgttaacttatccctgtccaaactgtggccgtcggaatgaaaaggttagcagcagtgaacttatttcaccggattaatttggcgtgttttttttttcttttccacctagagcatggcagttttcagtaaatttctgcttagcttttggcttgtactagtaaatttctacaggacactgcttatgtgtggttttaggcttttagccctaggacaaaatttgcctaataagtagtatatgttctgaaatgtcccgatgtaatatttctgctgttccttacatgtgcacatggatttcaattcatgcttaatatcatctgtcatgtgacagtcatacatgtacagactgttgctgtagttaacgcttcccttaagttgtaaaaagccaaatgaaatctaccacacaaatgcagtttactaacatctcatgttggctcttactaacagctcggtaccaacaatcatatactttgcatcggatgccgaggccattattgtgcgttgtgtcggaaaagagttttgaggggcgagcaacactttggacctagaggctgccagcaacacactgaagattgatagagatctcgtatgttgatcgctatgcagaatgttgttttgcctattccaatggcatactcgtacctctgtttctgacacccgctttgtacccaaaattagagttttcctgtagctgtatcatttaatttgcatcaggaatttcataacacttaccagttataggcagttacactgtttatgtttgtggaaaaacagataccatgcacctgatttgaacaaaacaggttttggcttgtaattagtgaacagttcaggtgtgtggagaatgaaaattcaattatccattttaagcatgtaccggccagttgatttatttcacaactctcaaaactgcgtcagttcattcacgattaactctacaatgcgtatcttgttggtaacctgaaatagtttctactgcgcactactgttcaggaagcattttaccgtagaaacctgaaaccctgtactagtgtactggaagtaatttggaaggaatcaaggacgttctactatgtagtatgtactccattagagagggcattcatggtctgaatcgataatcaccatggtcctcaatgagagcaaaaccacgcaccacagagcgagcccgaaaaggaagacgacaacgtcgtcgccggttcgacgcggacgccaccggcgatggagcccgcggagcggtggcgccatcctcgaggttccttcgccgccgtcgccactgcggcggtttcaaatgatattactagtcctaaaatatgagctttttcaaatgattttggttaaatgatatgcatatattatgaatctggataaatagttgcgtaaaaaaaaactggataaatggcttgttcaaattaatatccgtctaaattcatatcactagagtttatctcatccaacaaaaattcctaatattttataacgggactaatcttcgatctcagccacccatactaaattggatgtagggctgagggtgactttggagtataaacggtaatataaaataattgaaaggtctaatatgcagactactaaatgattaccatatcttgatctgcgccgccgaccttcaatcgggtggcaacctaaatacccggttttatagtttgggggtactagatggactcttgggtaagggtgggcattcgatctgaccgaaaatttcagtctttgtctttggtctttcggtcatttcggtctttaaaaagtgaagaccgaatttcaacacaaaaatgtcaggaccgaaaaattcggtctcagtcttggtcctgaccgaaattcagcaacattttcacatatgcaaagaaataatagaaaatttcaacacgaaatcacaaaaaaaaatcgtaagcacatatgagtaaagactcttattaggttgtatgcctagaagaagtaggaatgtgaaaattagagtttaatcctattgaatttagtggattgtaggttgcatttagacattttttttaatttggtctattcggttaaccgaggtgactaagcgaattgaccgaataaaattcggtctttcactgcctagaaccgaattgatgaccgaatttctcggtatcggtctttttggttcgatctttttctgcccatccctactcttgggcatagtttaggggggatttgactttttccttgcatttaaaatagtataggttcgcgtgaaaaaaacttactccctccgtcctaagattttgggtggatgcaacatatcctatcacaataaatccggatagtcaaaaatcccttatgtcatgggacaaaggggtacctactcgatatcgtccgcctagttttaatcgaacggtggacacgaacctacgtttttggcgtctaaaacggtaatacgccttaaaccgagggtctccccaagaaaactacctcaaccagtttgtactgggccgcggcagctgactatcgggacccacccgtcagcgtgattgcgaggacggcccctctttcttcaaccataagaagaaaagcagcatcgccgccgcggcaaccgctcgccggagctctcaccgcatccccgccgtcctcggtacttctctcaggcgaatctcacgtccacgttggttcctccgctcttcgccggttcgccccgatgaggtaacttttgcttgtttctctgcttgaccagagagattcagagctggtgcttgtcaattggtgccaaagttcagtacaatctgcagaaccaacttataccaaattaaacgaataaaattttgatcaatagaacttcgattcgcattggctagtagcatttaaatgttcagataatatcgagaccactggtagattagattcagccgcagctgatgttcagttagtttcagaaaaaaaattctgggcaagtttcagaattagagctaatatacggcacgattcctctcgcatgagattcacttttttcttttatcttaccacaaacattacacgccattagttccttctgattacgattttatggacacttccgaagacgaaggccaagtgagcagcggctcgccatctcccatctctctaaacatcaaagcaagcgaacaatctattccctgggaaattccgatgtcgagcgaagcctcgtcctcgtcctcggcggcggtggcggtgagggatctcggggatgacaacccctcggcgtcgccggaggttgacaccacctactgggcggcgcaggaagaggcgaccgcgctgctggagtcgatggccgcgagggttcgcggggaggaggaactctcggaggagcagatgcaagccaacgaccaactacaggaagacgaggtaatgcttactaagttcgcccgttgatcatgcttgtggtgaacaaatttccgatttgctgtttattttgcgcgaagttctattcaggttgatcaggatgtgccactactgtttctactatccatagatgcgaatattagggaatgatctaatatcagataattagaacgggtgaggcttcgaacccatgtcgtctagcccaccaccttgtagagctatccggaaaatccctgggagtttctcctgttctactatccatagattgcattggaaattacacctgtatgcttagcttctcagggaagctatagtatctgccctcagcagttctgattcagtccatcactttcaattaggattattcaagataaatgtgtctagaaagatatgatcactcaatttgcatgtagctattgtgctgccgtaatggatacgcccagatgaaatattgtcagtttataaaagctcgctgagtggtagtcctatataatttttttttcaggtaatagcactggaagctatttttggtggtgatatggtgatcttggagaataaggacagtcttcgatttattcaggtaatacatgtttcttttgaagtttctgttgtgctcaacttctatttttttagtagtgtaatgttcatgaaatattcctcagatttttgtgcactattcacttcctgatggtatccgtgtgttcttgaatcttcgtcgaagtggagctttggttggaactggtgacaatgaaaaccacaatggtggagaagtctgttatgcttgcagattgcagcatttaccacctgttgtgctgacatgtttgttgccacggtcatatccaagtacatgtgctccatattttactatctcagcgaagtggttggatgaaccaaaagtttcttacctgtgtgctgcgtttgatgagatttggacagagctcccagggcaagaagtcatatacagatggtggattggctgaatagctcttcgtggtctttcattgctttgaatgatgaaatagtattaagtccagatagaacctcaaaatttggagatgaacgtgcgattgcaagaagaattttagttgagtctactattcctctgatgcagatttacagtgagaagagatctcacaaggtatttttgcaaagcctttctgaatgcggaatttgtcttagtgaggatgctggtaattctcttgaactctaattaccatgtcatttttcacttctgttatatatatatatatatatatatatatatatatatatatatatatatatatatatatatatatatatatacgtttttaagtttctgctattgcattttactaggcataaatttcatcaatctcccatgccatcatttcttctgtgtgaagtgtatggagtctcactgcaaaattcatgtgaaagaaaggaatttaacacaactgacatgtcctgatacaaattgccgcagtccacttccaccatccttattgaaaagcctgctgcgagatgatggatatgcacaatgggaatcatttgctctaaagaaactgttagatgcaatgcctgatctagtctactgccccaggtgttatgctgcttgcttgcaagttgacaatgatgctcaatgtccggactgtttttttaccttctgcactttgtgcaaacaacgccgccatgtgggggacccatgtattactagacaagaaagaattctcattttgaaggtaacaataacatattatgttaagaatttagcattgtcgtgaaattctacaatatcatgtacattgagtatctttagattttgttatcattgttaattatcatatatagttatctttttatggttatatggtctccgggttatccatagtagctcatagtttgcaagtttcggttttgcttgtctgtttacagttagatgtatatgctgctttcctttcataagatgttatccacatgaacttttgtgagggcagagtgcatgagtttggtagaatttcctaagcaagaacatgcgcatgtatctaattgaaaaatgaatcaaaggatgtcatctaggccccagagtagtttccccagcaagatccgtgttaggccccaaagtagtttccccagcaagatccatggctgtgtttagatccaaagtttggatccaaacttcagtccttttccatcacatcaacctgtcatacacacataacttttcagtcacatcatctccaatttcaaccaaaatccaaactttgcgctgaactaaacacagcccatgtttggaaattatagtgagctaaccagggtacgcaaagcgtgccattgcccactgcctcttcttcttttttttgtttcttttttcttttcctgccagggttgctttaagcttacagtccttctgctacacccaactatgctatttttttcacaagaaaaaggatgaaaatgacatctatttgatggtgtgaatcaaatgtactacaaacttttttttctctatttaatgttgttcactactttctaacaggaacgtcagaagttgcattccatgccagcggaacaattgttgaaagaacggagggaattagaagagttgatgaatatccaggaagcgcttcgtagttctaagcaatgccctcattgtaagatggctatctcaaaaattgaaggttgcaacaagatgatttgcgtgaactgtgggggatacttttgctatcgttgcaaccaggcaattaaaggatacgagcatttctggtatgatgttgattcttgtacataatgtttcacgtccaattttctgcacattgagctagcaactaagttttttcctgctgaaggggtggaaattgtgtgctgtttgggacccacgcgcactaccaaattcgaaacccacagcagcagcgtgatgaaaatcctggtgaccacgctgaactcttagaacaacgggtgcagctcacttatccctgtccaaactgtggcagtcggaacgaaaaggttagcagtactgaacttatttcaattgagggcgtgttttttccgtttccacctagagcatggtggtagctttcagtaatgctccatttgcttagcttttggcttctactagtaaaatgttttatgtttgtcttatcgctattaaagctatatatgttaatggaaatttgcctctataacaaactagtatacttatgaaaagcccgagtaatatttctactgttcctggcatgtgcacatgcatttcgatgtgctgaatgaaatctaccacatgaatgtggtttactaacatctcatgttggatctttctaacagctgggcaccaacaatcatatatcttgcccgggatgccgaggccattattgtgcattgtgtcggaaaagggtcttgaagtgttcccaacactttggacctagaggttgccagcaacacactgaagatgctaggtagagagatcatttgtcaatcgctatgcagaactttgttttgcctattccagcgtcatatactcatacactgattttaaaattgtacttacctgtaacagtacccaaaattagagctttcctatagcagtacaactttggatttgcagtaggaatttcttcatagcactttactacagtcgatattggtggaaaaaaaacaaaagcacacatatacctgatttgaacgaacaaggttttggcttgtaattagtgaacagttcaaatgtgtggagaataaagattcaattcattcatttgatcattacaagcttgtacccaccagttgatctatttcgtagttaacgcaattcgcaccagttcattcaagattcagcgctgcatttcacgtccttgtttgaaacctgaaaggagaaccaatatacagcacggaacattttattgtgtacgggaagcaatttgaaaggagtcgagggcattcttttatacctaaagaagggataatcttgggataatcaaggcccactcaagagttaaaaaaaaaagagcctactcaagagttaaaacaaaaagatttggagggagagacatccctccaaacactttttaggaagaaattgtgagcgtattaaagattgaacatgagacctcgaaattgaaaccacacacttcttaccattgcactatcaagtgcatctcatgacccattcaaaagttggatcaaacgatgatgaccatggtcataggtgatgcttttttctgattaaaatacacatttttcttaattttcattatcacatgtttttcaagctgctagagcaaaccacacatcacattctccaatagaagagggtaggagatgtcacatcaagcgagcatgagaaagaagagtctgtgtgtcgggccatcaacgtgcgctccacgaccggagatgtggcacacgaagcactcgacctttctcttctcaagcaaaatgggatccccacctctttcacgccatcttcaaggttcttctcctagactcttaccatacagcccctccccccccccccaaccatcgtcagctctactgttgcaactcacgtcactatggcggtctaagatgataatactacaaaataaataaactagcccccaacacctaataatatttgatctcagccaaccatataaaatcaggtggaggactgacggtgatgggttgtttagcgaaccaaaacacggtaatatgaaaaattacctcaattgttattgtatctttgatatgaaccatctaccttcgatcagatggtaaccgaagcaccgaagtttgatacaatttaggagcttataaggtaaaacggtataaaggtgagggttcgcacgcacgtcgtatatcatccacctaattttaataaaatagtggaaataatgcctagttctaagcgaaaatgtgtacttatacctagtccattgtgaaacgtagtcaacagaatatagtataagatgcaatttgcttaaaaaagccctaggtttttggcgtgtgaagcaggtaataagcattaaatgctcacttcttacccggtagtaactattgtaggactagtaagtagttgcagcccggtaacacgggtacaaccgggtaacatgaattaaactatcttatttgcagaatgtctctgacaaaagtcatggaaataagtcatggctagagacggctatcggtgattttttctgaagctggtccctggcccacactactgacacactactatcaagttgggcaagtaacattgctgttgccctaatgggccgcggcagctgactgattggacccacccgtcagcgtgattacgaggacggcctctctttcttcaaccttaagaaagcagcaacgatgctgcggcggccgctcgccggagctccgcccgcactcgccgtcggcacctctctctccggtgaatctcgcgtccacgttggttattccgctcttcgcccccgttgagttaacttttgttcttttcttttcctctgcttcagagattcagtgcggctgcttgtcaattgttaccaaagttcagtacaatttgcagaaccattaccaaattaagcgaataatttatttatcaatagaacttcaattcgcattggttagtagcattcaaatgttcagataatcgcgagaccacgggtagatgtaagccgcagctaatgttcagcaagtttcagaattttttttgggcaatgtttcagaattcagagctaatatacggcacgactcctctcgcatgatattcactgttttttttatgttaccaaacagtgcaagccgtaaattcctttcgattacgaatatacatcgttcgaagacgaaggccaagtgagcagcggctcgctcgtcgcggccgtggaaattaccatgatgacgccgggatcgtcctcgacttcggtgccgggagatgaggccgacgccggcaactgggatgcgggggtggagacggcggcgcggctggaggcgatggttcatgcggaggacgaactctcggaggagcagattcaagccaacaaccagacacaggaagatgaggtaggacaaggattacccctgctgtttcttggatcatcttttctgctgtactttgcacagttacgcatattaggtttctgacagacttgcactgatagatcgattttaacatattatccaggaatatcttgtatcaatgtggtacctatatggttcagttcagttagggggtgtttagatccaggggtgtaaagttttggtgtgtcacatcggatattatatagggtatcgcatggggtgttcgagcactaataaaaaaataattacataatctgtcagtaaaccgcgagacgaatttattaagcctaattaatccgtcattagtaaatgtttattgtagcaccacattgtcaaatcatagagcaattagacttaaaaaattcgtctcacaaattagtcgtaatctgtgcaattagtttttttagactatatttaataatacttcatgcagatgttcaaacgttcgatgtgacaaggtgtaaaattttagggtgggatctaatcaggcccttagttcagataaaaagcacagatctgttgatgtgttcagttctaccgttaagtacatatgaccagatgattgttattgccgatgatactatctagtaattaacctgatatgaatctgcagctgctggcactacaggccatctatggtgatgatttggttatcttcgacaataaggacggccttcgatttttccaggtaacatcaccccctcatatcttcaccgtgaagaaccttgcagtttcagaagaaaaaaattatgattaatgtccacgtctcattgtcctcagatttctctgcactatcaactcgccggtgacatccgagtttacctgaatgtctgccccaacgggagaacagaaaccggagcagaaaacgacgacgacgacgacagtgaccgactcttgtatgcttgcagcctgcagcatctgcctcctgttgtgctagcctgcctactaccacgtttatatccgagtcaccgtgccccctacttcgtggtcgccgcgaagtggctggacgagccggaagtttcaagcttctgctctgttcttgatgagatctgggcagagcagcctgcagggcaagaggtggtgtacaaatgggtggactggctgagcacctcttcctggttttgcattgcttcagatgatcagattgtatttggaccagatgcagactcggctggtggtgatgaccgggcaatcggaagaagctgctcccttgattctatgatccctctaattcaacgttacagcaaggagagatcacatgaaattttcgctcgaagaatccatgagtgcggagtctgtctcagtgaaaatacaggtaattgatccatttggtgctcaaactgtgcaatgcttgctcaagttttaaatttgttcttgtacactgatatggcaggcagaaacttcatacagctcccatgcagccactccttctgcgtcaagtgcatggagacgcagtgcaggatccacgtgaaggaagggagcgtggcgaggctgacatgcccggacacgtcgtgccgccggccgctgccgccggcgctgctgaggggcctcctcggcgacggcgagtacgcgcggtgggagtcgctggtgctgcgaggatgctggacacgatgcccgacgtggcctactgccccaggtgcagcgccgcgtgcgtggcggccggcgacgacgcccagtgctcgaggtgcttcttcaccttctgcgccgtctgccgggagcggcgccacgtcggggacacctgcgtctccccgaaccagatgctcgacatcatgctggtaattaactaattctaacaatgccatgcatggagagagttcttccttccttgatctcatgacacacaaactctcacggtctcaccgtcgatctgttgcaggaacggcagaaggagaagaggccgttggcggcgccgtcgccggacagccaggcggtgtcgtcgaagaggaagatggaggagcttctgagcctccgcgaggtgatgcgcacgtcgaggcagtgcccgtcgtgcaagatggccgtgtccaagacggccggctgcaacaagatggtgtgtagcaactgcggccgccccttctgctaccgctgcagcagggccatcaccggctacgagcacttcgcgtacgcatcactcccctgcccccaaatcaaatgaccaaatctttcttctcctatgatcttcttacctctctgctttggcgtcgacgcagtggggagtgcaagctgttcgagagcgtcggcaaggggtggttcccggggcaggcgatgtggatgaacctcgaatacgactacgacgagatcgccgagatcgggacgccctcgtggatacgggctatcaggtatccctgccctacctgcggcgccaagcgcaccaaggttagtttaccaagcaaacttcagaatgatttttactacttccttcgtttcatattattataaatcggttaatatttttcttagttaaacttctttgaccatgttatcaaaatatattcaatataaaatttaatcaaactaatttgatattttagatattgctaaacttttctataaactaggaaaaaagttaactaaagtactaatcaattcttcagagatgtaagtacaccaggcagtaaaatggattggttttgctgctttgcagtcgggcaacaatgaccttctaacgtgcagaggatgccgaacccattactgcgcgctgtgctcgaagaaggtatggagcatcgccgagcactatgggccagcagaatgactgacatggcagtacattaactcagcaaagagtagatgacccactgttcacataagcatttgcaaattttacttactgtgtaatgggagtaatttaaaaggaatcaagggcgctgccggctgccagttcagcaatgctagcatgtagtctcaaactctcaaagctgccgttacagagtataaactgttcatataaacaaatctgaaaataaaaagggagtcagagaacataatcaagaataaccccgcaaaagaaatcgatcatgttgctattctcacacacgattcattgactatatacatcgctcccggtagtttaagcacacagaagcatctgatttcatgaaatgcttggacatttcgtacaaattttttccatacaatgcaaacatttgaatgtacggtacatcatgaatttgcttgtggaatcttgtttttttttttcgccgggaccttgtggaatcttgttgctgattagttccataagacagccccagtcaaaaacctatggttcagtacagcttcagcaattggacgcttacgatagtccggatttagcattgcctatggcaaagaaatcagtcagtgttctttctgaatatatatttcggtgaaaccaatagtcggattactcaatcctatgtgttgtttctgaatatatattttggtgaaaccaatagttggatcactccatcctatgttctgcaatactactagcatattcagatattcttcagcagcggaattttttaacaatatgtatatgattcatagaggcaaacctgcaacaactcccagccggcaccatcacccaagtctagaaaatctacagcttcggacaaccggtcatctgccagaaagtacctacaaaaaattcctgaagctaataagcatgcctattgaatttgaatatcatgactgaaaaccagtcgagaaataagcaataacagttttctcaagtagacttgagagtgagtagatctctctacaactaaactatgagaaatctggttttgttctagaaagacatactctcttgcagcataaatgtcgagacggaacgtattctccaaaagtctctgcacaataaacctatgctatattagttatctcaatgctatgaggaaatcaccattttatttatgaattacaataaaatatcctcagtgacctgcaatgaaatgccatccatagttcctgcttcgcaaaagggaataaatgacatgtatgcaagaagtagcccagctccatatctgttttgtcaaaagtacataagaatacatgtaactagtgctttgtcaataagagggaaaggaagatacttgcatgtcgtcagctattccaaaagctcgcttctccagaggagttgatgctccagcagcagatgctcgacgccacagtccatccgacaatgctccagaaccaacagacgaatacctgcgattgtcaaaagtatctgttttctacaatgttttcttcttttctccataaaacaaatgtaggaagggaatagacatatacccaatatctacagagaaagctaaatcacggagatgcggaaccaaatagcgcccatttttctctgctacagtactaaagaaagtcacatctactaatggttagttgaattgaaatatcataaactacaaaatgaaaattaaagcattccaataaaaaagaaaactaaaggaggaaaatgcagcatacttgagaacaacagaagagggaccaaggctttggtgcagtctatcatgattatgcatgtgaacaaggccacacatagctccataaagcagcttaagaacaaagtatcgctttagttccaatttgtatgctcgatcgtaaggattccagaacgatatggatccagattgctccttcagttttctttcactggttaattttgcatagtctgcagcactatatctcccgtcatcacggaaggcaagccactgtacaaaagctgtataagtctcacagtcacagcattatactgacagtctgtgaatggacaagcttatgtggtagacctgctctccagtagccgtctcaaaggctcctaacagaaactgaatgttctcgcagatgtcactagcatcattctgtaagtataaaccaagaaaaaaaatatttttacaaatgtcttctctaccaaatcattcagacttgcaggtttctgttagcagttctgtgaatttcctaacctgaagaaaagcatgagttcttagctcattaactgccatcaagtcagcttcagaagcaccagaacgggacccaggatatacctttgtttcaaaacctatgtcttagcacacataagatagtcaatagattcatacatctagagcggagaaaggtagcaccatcatataatccaagcaataccttaaatagagcttctgtgcccttcagtggaccttgaaccactcttccctcataaagtctgcacttgactatgacaagcaaataaaatcagtggacattttctatcaggtagcatacaaaatcaccatgtcaagtggaatgaaataacctaatattaacttctccttctccaacatcttgagctctcaatcgctcaatctcttccggtgaatatccaagaccgaggttttgaataccagcaacatctggaagccctccaaattgagaagatggataactatttcacatgaaaggaagttagaaacggtgaatattaaagaaaactctgtcaattatttattcttataagtagatcgcaatatgccaaaaaatatgctcaaggtcatgaaaaatctggtgattctttagtctagaaaaaccaatacaactatactctcatcaactcattaaaataaaaactatatgaagtggaacatattagatgcagcatggttccattgcatgttgtaatgttctacaacgttttgcggaaaattatcagaatcagtagtaataacatatgaacagatatctttctggctgcccacggcattttctttagctcattggactttttacagttgtagaatgtcatcacgaggtgccaaaaaatgatgctagttgtcacctccaaagcgtttctctgaattggccatctcctaattttcctaacctatgtataactaggtaagcatatataaatgccatatagaattgtcaatatctcgataaatcttcacctcaagattgaaattttatcataaactggccatctccaagtgattcaactggacataagcaaattaacctaagggacaggcaggaatagtacgacgcttgaaccatttccacatagccaaatactgggagctcaatgtttacatcttttgtactaaaatgtttaaggtaagctcacctctacaagtgtggatcccttaataacttctcaagaagcataaagaaacgaccacataatcaagaaaaaaaatcaggaatgcggaccttgtgatgttcatgaaaccgtagccacccaagtatcttcccacctcgaagtaagcgggattggtcatcagagccgccgaaatcggcggcggagaccgtcggaaaggtcgccggcgccatccacccgggtccagcgaggagaggaaactggtgggaggagctttcagcatcgtaaccgacggagcagccggagagtggagactgacactctcactggtgtgtttggggataaggcagcaaaagcctctcccagccacagaatgccaggaacagctaaatttgttatttttatttcaaaaattaccattttccaagaaggtaatccaaaaagtatttgttgtcttatgtgcggaaaaccatttttaatgcgtgtctccgttaattggatcactagtttgctcttgttgtttgggaatttttatttacatcttaaaaagactcatggtttacaacttaaagttacgaaaaaccacgtgtattatgagattttgcatatattaatagttttatggtttcaatgttgtataaaaccccacgttaattgaaatcttataaacttcagcatattttaaacaaatttctaaaagcgttaaagtattaaactatcatccatagtgactaagaacttaacacctaaaatttttatatacattatatgttttagaattttaagcaatttcgcgcttaaaatacataggagtatggtattgtaaaattttagaaccatactacataatacataaggttaagtgcaacatgtaataatgcatgtggttttctgttactttttattataaaatttaagttttgtgaaatttaatcattttttattttagactcgtcgaagctggaaactggaacactgaagccggtgggtgtgcctgtggatctgacacctctctcccgtaatccaagcattttccgttacgcccctgaggagagagagagaggcagagattaccctgcattacggggagtggtagtggtaggtaatccggtacatcgcgcgcgaaatttactctccctctccacttgctctcccccgatgactcctacccaccattgctagtccaatacaaagaatccgcattggcattctgcaatggcaatggcgaagctgcgcgagcgccggcagctgcggctgtccgtgccggcgtcgccgccgccattcccgcacctggaccaccccttcgccgccctgccgtccacgccgccgggctcgcccgtcctggcggagctcgagatgctgtccgtcgtcgggcgcggcgcgggcggcacggtctacagggcgcggcaccggcgcacgggcgccgcgctcgcggtcaaggagatgcgcgacgacggcgcggcgctccgcgaggccggcgcgcacctccgcgtggccgccgcggcgcccgaccacccgtcggtcgtccgcctccacggcgtctgcgtcggccaccccgtcgccgggaaccggttcgtgtacctcgtcctcgagtacctcccggagggctccctgagcgacgtgctcgtgcggggcgccctcccggagcccgccatcgccggcgtcacgcggtgcgtgctccgtggcctgagccacctgcaccgcctcggcgtcgcgcacggcgacgtgaagccgtccaacctcctcgtcggccaccgcggcgagatcaagatcgccgacttcggcgccagccgcgtcgtcacgggccgcgacgaagcccaccaccagtcacccggcacgtgggcgtacatgagccccgagaagctccacccggaagggttcggcggcggtggcggcgccgacttctccggcgacgtgtggtccctgggagtcgtgctgctcgaatgccacgccggcaggttcccgctcgtggccgccggggagaggccggactggccggcgctcgtcctggccgtgtgcttcgccgccgcgccggaggtgcccgtcgcggcgtcgccggagttcggcggcttcgtgcggcggtgcctggagaaggactggaggaggagggccaccgtggaggagcttcttggacaccccttcgtcgcgggaaagccgtctcgttgcgagcgccaaaacgagtggcgcaccaccttccaggacaaaactggccaagtgaacacgagcatctacggagaagaatagaagatgaaattaaagtttaaaaggaaaaaacaattttgatcgcttaattggatctttgatcagagctggtaatgatgcaagtccaacgggaacgtgaatgagagaggactggttagtatagatgatcatctggacctgcatgatttggtgagtcctgaagagattttcttttgcttcacctggactaggatcagttttttggaaacaagttctgttaggattttcagggaaataagttaataagatagagggctttggtttatttgtggtttatcggaaacaactacacgtcgggcgctcgatccgggataaaaaaaatcaggtgcccacgtcatgctgacgtcagcaagcatgcatgcatgcaaaactattttaaactattttttctcttaaattatttatccaaatcatgatccgattgcactgttaaattcgttgcaattaaatctttaaaacaagaccacacatggatatattccgataaaaaattagcttattattgaattatttttaaatgttgcacgatgttccaacaagtatatcggaattgtttcactaactagatcgaaaatgtttcaatcgtttaaatcggatgtcatttcaccttatataaaaacaatgtttcagtaaatagcgaaaaaatatttcagtttactgcaatatttgatccatatagtgaaacattataagtacattaggtgaaacatttttggtggaacaaaaaatgaaacgaattcccttaatagagggtttccataatatgagtgttttgttgcaaaagaatgtttcaattcactgcaacattacatctatacatagtaaaacattgtgagtacactaggtgaaatattttttgtggtacaaaaaaaataaaacgaattcccttaatagagggtttccaaaatatgtgggtgatttattgcaatggagtatgtggtgaagacacgtgtgtcaggtggcagggatacgtggggcacgtgtgcgcgttgggagggggagcgaccgattatgctccctcccccgagcgatcgagtaggaggattatcatggtttatcagataattatccgtataaatctgagatatttataaaacttcttatcgttgaaggataaaactgaactaatcacgaaccctctgtgcaaacagctgaacttctcgagggcggaaaggcatgtggaaatgtggttatgatcaagatttttgctgggccatgagcctaggcctgctggctacggaagtccattggaataagttcactggaggtccctcaacttaatagctagatcttttaggtcctttaaccacaaaatcagaaatgtgtacccctaaacacacaaaccgtgcactcacgacttgtttggtaactcaagagaaggggattgggagtttacacgagggaaatgatgatgagattaagatgtaaatttgatttttaatcccaatatcttgtttggtagaggtgatggaaattgatagggagtttagttggagattagatcattaataaaaacggatggctgagatttgtttagataaagtaaaggaggaattccctcccaattacctgcccctacccaggtattgaaaatgagggagtttcttcctcaattccccatccccatcccaccaaaattcccatgtctcccaaccaaacaaaacacttaatagcatcatccctctaaactcccaatctctcctaaaaactccctccaaccaaacgggccgtcaaggtcctatggcagtatatatgggtggtttcgccgacgtggcatcctagtcagcaaaaaaaataaaaaaagtatgtgaggcccacatatcagttgcactttttttttcctcttttctctcttctgtctcttctctcttctattctgcggcgggtggtgtggcaatggcggcgtgcttccgctgcgcgcggcacggcatctggccccacggggcccagcctggcgacctccgtctacgatactcacctcggccttgccacgctgtcctggacgcgcacctccctcagcctctcgctccgcgccatgctccacctctcgtccccggccaccccagcatccaactcagtagcgggggtggggatatacttcgataaggacaccgacggggagaccctagcctttcgtgtccgcccctggctccacgactgccgcgtcgagcacctccgccacctcgacctctctaggaacagcctcaacagcatcttgccggcgaagctgctcaacgcgaccgagctccgggtgctctcacttgccgacaatgacatctctagcgtgctccccaatggcggctccgtctcgtacttgctcagcctccaggagctcaacctgtcgaacaacgcgctcgccgggcgcctcccgcccgctctctacaggctgccgagcctcgccgtgcttggtctcaccaacaactacctcatcggcgatctcgctgccttggagggcgtcgacttgagcgccaactaattcaatggatttctctcgtccgacttcggtgggagccggctacgattcttgaacatctcgtcgaacaagctcaatggcgctatacctaccgagttgtccgccgtcgtgccggcgaactcgacttgcacacacttcccggtctcgggttcgcccaagccttcctcttggttcttcgtcgccgttgtcgccgtaggggatttgtcagacgccgcctaccgcaagacacgggcgaggttccccgccggcccgcgccccgtgctgctctcccgacgggagcacgtctccatgcgcgacgccggccacaggcaccggagctgggtgatcgtgcgtggcaaggatcgggagatctccgtggatctcgtgtcccgcggctggggcaaggacgggaggagcagcagcagggaaaagaggaggagaagaagaaaagagaagaaaaaaaagatgtgcatctgacatgtgggtctcatgtacttttttttctaactaggatgccacgtcagtgaaatcacccatatatactggtataggacattaagtgcacggtttttgtgagtttagaggtacacatttctgcttttatggttaagagacctcaaaaattctcattgttaagttgagggacctccggtgaacttattccacgtccatttaatctggcccaacttaggctagaggcttcggtaagcaaggtaatcaaacagtggggactgagatggcaacggtgaattcatcgtcggggtccacatccgcgtccccgtcaccgcggtgataaaatttggtgacggtgataaaatttcaccgtccccacccccgtcaaccacgacaggggtacattttcaccagccccgatcaccacgcggtgaatttttccccgtggtgaacccgccccgcttgaacaataaattcatccccaaatcatatatatgcaatgaacacaaatcgatggcaaaggaatcgatggcagccgatggcgtgctggctggccggaggcggtgagcggcgcaacgacagttggaggcggtgcgcacgcgtcgacggttggaggtgccggtcggtgcgacgatggtcggaggcggcgagcgcgcatcgacggccggaggcgcagggcggcgcgacgacggccgaaggcggcggtgcgtgcgtcgacagctgggggccaggaccgcgcccgcgcaaggggatgcagcggccgccggcggcgccgacgactgggagccgggaccgcgcccgcgcgaggggatgcggcggccggcggcgccgtgaagcagtggaggcggcgctgtggacctcggaggcggcgggcggcgcgtcgtcggccggaagcggcggcgtgcggcgttgcttgtgtatggagaaggagaaggatttggggggaagggtagactagggttagaggtatatatataccttgtcattgggcttcaattctatgggccacatgactaataaagtctagaaatgatccctagctacagttaatgcgggtcaccgtgggagacggggacagggagtggagcaccgtccccgcccccgccatccccgatggtaatgaattttggaccattagaatcaccatggagggtagatgttaaccatccccatcacctaataggtgaattcaccacggggaagcggtgaacgggcccccattgccatctctagtggggacagtggttggtaaagattgaaattctactccttccggaaaattctataaattagtgtgaaacttctgtgtttcgaagaaactttaaagagttaaaaaatgattataatcatatggaaagagatgtaatcaaatgcaatgaatagaaaaagggagacagatgcaagtaaaggaaagcagggagaaaccaaaaaaaaaagttacatgcattagcaaaagcaaacgcttttgatatcataattgagatccggtgatgattctcaaaaggatgctatgtacgttggtagcagtagtggtaggcctcagatgttggttctgatgaccaaccgcttacgtcacgatgacggcatgcggtatgaatttgcaaactcattggcacttctcaataatataagtacaaatgctacaatataggagtgtgtgatatatatagcacttctcattggctcttcaatggagtgccgtcccatgcccaatcaaaaactacattttcttgggttaaaaatgttaaaaaaagagcactagaaggtagtaaacacttgtgttgtgtctctactacactttcgccttgtgtttgacggcttgaccctttttgtatgtgcatcctagttaatctaaaccttcgccatttactgcaacaccaaacaaattaatcactcttcgtcgtcgcgtcaaatatagcgggtaaattgtgttgatcgattcgtatttgctgtagatgatagtgcagtggccgatctatcttgatcgatctatctcgtccgttggatcagatcactattggttaaactccgccttctgctccaaatcggacggacgtgatccatcggtggaatcatgagagaacggcgggtgatgcgatctcctggagcggagaggcggtgggcccggactggaagtaggtggagactgggtccccctctgtttccgtgagtgggcccgggtaacaaacctgtccgggtgggtccggatgggccagggactcgtccatgggcccccacaggccgagctccttctccaaattctctacccaccactctgctccctcctctcccgggctggcggtacatggcactgttgcatcgccgtcgccgggctcatcgccgccgtagccgtcgatgatgctccatatatccggctcgatgtcgatctccggcaggtcgagcagctcgtccgacacggcgccgacgcacgtcgtcgtcgtcagggaggacgacgagcacggggacggcggcattggcgccgcgaccagcggcgcctccgtgggcgcgtccaccagcatgtccgagatgtcgatgtcttgctcgaagaaggacacgtcgacgttctcgggctccttgctcgtgccgcactgctcgccggccgtgtcgccgctgttgttgttattggccgccgtcgtcgtcgaggaggacgccgacgacgacggggaatgcgcgtcggcgtcgtcgctggcgtccgcggccttgcccttcttcttggtgtcacctggcttctctctctgcgacaccctcttcttcaggtgggtgttccacacgttcttgatctcgttgtccgtcctcccgggcaggcacgacgcgatcttggaccacctgagcaaaaaaccaaatccgatgagaccgaccacgagatcgaacacgcaagaattaactaacacccaagcattgagggccaacgaagaacttacttgttcccgagtaggccgtgcagcttgatgatggtgtcctcctcgtcggcggtgaagttgccgcgcttcaggtcggggcgcaggtagttgatccaccggaggcggcagctcttgccgcaccgcagcaatccggcctgcttggggagggctcgccagttggcgtggccgtgcttctggatgtaggcgatgagccgcatgtcctcctgcggcgtccacgaacccctgttcagccccaccttggcgcagcacggcgctcgtcccctccccatgcccacctctgtctgaacgtttcccggacagagtagcagtggatgatggatgaagcagaagatggtgatcgagagcgcatgggagaccgggagggggtggtatatatgtgcacgcgccgaggtctgaaacgggcagggcgttctgtctcctctccctctccctatcaccttcctatagcttgtttggagtcttaatattctaaagaaacaactggttggtaattagttttcgagaatcttgaagaattgggtttcttaatttttagctttcggttaattttctggattttacaactacaatttctcataatttagatatttcttattttggttttgaaagaaggtgtagctaagcttcccaaacagttttagtctctccgacgtgatgatgacggatgacaacctccccatctctgtctctctcgttcgtctcccccgttctcttctactcctacctccgagacgagactattgcgcttaccaaacccctgtccctggaaagcgacgccgtgtggcccctggccggcggtcgggttcgtcggcggtgatgtgtagcgggggttgttaaccacggcgtgctcccttctctcgctgctagcgcgcctggcgatcctacacgtgtgcttagctgccgctaatttctagctttggcgcaggcttttggagtagttgtgtgggagagatttgaagtggcaacctttttgtgatgataatgtactgtatatataactatttatatcctttttgttttgaatcctatctcctgattacaaattcagtagcttttcatcttattaacgcgtgaaagtgtgttctagttctaaatgtgtgtaaatataactagcatggcggcccgcgcagattgcgcggctagcatcattatattttctctcatataatagcatatctgttttctcattatattattaaaatatattacaatgacaacatagttttaaattttgcaataaccttacgaaactactaatgtgtaatattcatattgtattttatatacgtgttagttattaattttttttaatatcaaattttagttatttgtaaattatatatattcctatatggactatagacttgtcttttaatattttttaattctgattttttattatttttaattgtatttttatgtggactctaaacttatctttcaatattctttaatctttaatttcaaatttcagttacttctaaattgtatttctatattgactttaaactcttcttcccatgtttttcttaatttcgaattttagttactttttctctgattaatgtgagaatttctaggtcatgagagcgaacgtagatgcacctttttattccgaattttagttagttttaaattcctatacggcttatggactctatactctacttctaatattccttatttttagattccgaatttctattttttttcttaattgtatttctatatggattctatactctacttctaatattccttatttttaattccgaatttctattatttcctaattttatttctatatggaccgtatactctatttctaatattccttatttttaattccgaatttcaattatttcctaattgtatttctatatggactctagtctcctcttctaatattccttatttttttaatttcgaatttcaacaatttctgaattgtatttctatatggactctagtctcctctaatattctttattttttaattccaaatttcagctatttctaaattgtatttctatatggactctgccttttctttttctctaattaatgtgagaatttctaggtcatgagagcgaacatggaggttcctttttttttccgaattttagttagttttaaattcctatatagactctatactctacttctaatattccttattttttaatttcgaatttctatttttttcttaattgtatttctatatggactctatactctacttctagtattccttatttttaattccgaatttctattatttcctaattgtatttctatctagactctttactctacttataatattccttatttttaattccgaatttcagttatttcctaattttatttctatatggactctggtctcttcttctaatattccttatttttaattccgaatttcagctatttctaaattgtgtttctatatggactctgtattttctttttctccgattaatgtgagaatttctaggccatgatagcgaacgtggaggctcttttttctattcctttaattatataatagattttgatttttaatatatctcccaggggctatatgaagtagcagtgggggtggtcatcatctaccaacgtttttatatagccgtaaaaggtctagttcaccgggaaagtgcacactttctttccgagcaaaagttggctgaaatgtgacggcatgattttcttgggcctctggagattttgtcgttgtcttattcttgtagtacatgaaaaaaaaattacagtgagcaaggtttttcagtgttctatatagcatattaaagttgcgttctcctttagtcattaaaattgtttgtgtgtctaactaaactcggcttttggtggaagcctaaaaatgtgttttcttagagagaactgctgatcggttatgcaagtagacctttttctcctaatcaaacattagttaaggagaaaatagatatgtaaaataaagcacttcgcttaaaatctaaattacatatatactattattatcttttgaaaggaatattaagtccatgtttctgtttggagagcttttaacagcaacaccttttttcagaatctctaaatctccaaataatttaaatttcgagtgtgacgtttgtttctattaaaaacgaacatgaatattaaattatgacgaaaaaaaagaaaaccactagccatgattaattgagtttttagtcattacaaacttgaaaaagatttatctaatattttaaagcaacatctatacagaaagttagttttcagacaaaatataccatttaacagtttgaaaaacatgctaataaaaaatcaaggtaaaatccgtatcttaataaaaaaaataacggggatgcatgctaagggcacccacaatggttatctataaactctctacaagagatccatgtcagaatattttcctacttggaagaaattaaatgaagagagagagcaaaactatctactaacctggagatggtctatagagaaaaacgtggcaatagattagagaactatagatatccatgtagacataccattaaagtggtttactattaatatagtctattgctgagatgtacatgttttatagatagcaccttactttaccattgcgggtgctctaatagcccaaatagtatctgaacacttcaatgcttgccaaatgatctttgtacctaggagttggtccttttgaagacagtgactttgcttttattttgataaaatagatccaaggttgaaggatgcgatacgctttcaccgtttatgacactagctcgtgcacgttactgagaaattctacagcatgctctatttaattcttccaggaaattaaatggcaactagtctgctgaaggctgaagcctacgacagaccgttcaaacaagtgggagaaaataaagtacctaatcatcttaaagtcgtttttaagcaactagcggcacacatttttgattctgtgtacttcaaaggtcagtgatcgagctcctacacaagatagcaatttaaacaattctccacatttttggcaagaaccgcctaattctacaactctagggtgctactctgcttgattgtgatatcctaagtcctaactccaaatatgtaggtggccactcgcaaggttaaagatattccggtcataatatcataatatttaacatttaggacatggttcaatcaaattttaactaccatttttatgacagtacttcctccttccgcttatatatgtcattgattagttcttttttttaactaaccaacgtaaaagagaaagtacttttaagacaaatctatttttttttcttaaaatagcatttgtgaaggtatttatggttaaaatcttaaaaatagacctaagccttgtcgtaaatataaaatattcacaagcaggggagtatataattcagaaagacaagtaatgagatcgagcaccagccaaacatatgaggcaagccaccatacgtgattcttgtagcaagtctatcaacagtggaaaaacaaataatggagctactccctccttctcaaaatataactatccttagcgtttaaaaacttgtcctatattctttttcatctactatttaatttctttacctattttctcttcttaaccaattacatattttctccatttaatttcacccactttcttaatctccattaaaaaacttgcatgttcacggtatatattaaggctatgtttgacataattccggatctcatatcctcattggatctgaattttgtacattaaattatagtggtttaaagttttaattttcatttaaaataataaaaaatgatttattcaaatgttattaacaaattcatatatctagatatatggatctgtgaagttaattaggaatacttaggtctaagaaattttgaatgagctgcaaatagggtctaaagtaccagttgctctagtttttcttttaagggtagagtgctgctccagaattctaatactaaacataaatttatatggctgtaacagttgagaattgcgacgcaattcagaacttcagattggaatctctgtccgcatgtatgggctctgcatacttttggctaatcgagtatactagcaattcgacgtagctcaacaacccgtccttttccatgccaaaggcttgagagttccgattccagtgtgtcacaagatctctcaagtccatgagttgggagtgtggtcagtacaagcttagactaccagacagccagttgccgttttgccttcctcgcacctaactcttgacatgctctcgattgataggtcgtccttgtaggcatttcgtcatgtgtcgaattaggactctttaggaggaagaataaggctcgtttccaggggtcccatttccaactcccctttttcgtttttcgtgcgtacgtttttcaaactactaaatgatgtgttttttttcaaaaagtttctataagaaagttgcttaaaaatcatattaatctatttttttttgaaaaaactaatacttaattaatcgcacgctaatggatcgctccgtttttcgtgcaggaggtattagttcttatcccttgaaatcgaacacagcctaataatgggttataatccgactataaacttatactaaagagagataaagaaaagcgataagtgttggctcatgcaagagatagctatacactttctccaaaacatttacattaaagaggagagaaaaaataaagccaatattatagttagcacatgttaattttagtatgagctaatagccaatagttagctacttcctccgttttataatgtaagtcattctagcatttctcatattcatattgatgttaatgaatctagacattattaacattaatatgaaggtaggaaatgctagaatgatttacattgtgaaaaaaagggagtatattattaaacctgctctaagccactgtacgtttcatcagcttcgcactaccgggggagacaatcaaaacccacggctttaacacaagtatcctggtcaagctagctatagttcagtacttcagtacccccctaccaatatcccgagtgacgttctagctaacctcatcgtcatttggacaactgtgacaatgaacatggctggttgcgatcagtagatttggagaggggaaagagacgttccgtacataaatggtgtgtacaagtcaacaacatgcatgcatccatgactataacttgtgtgtctgtgtgtgaaggacaacacaccagtgtgaactctctcaagaatagtaacgcatagaactgtcaactattccaggtaacaatttgttgagaaaattagaaacaaaatcccaggtactcctacgtaacagtgatggcagaaacaaaatgtattatgttgttttcttaataagatatatagttcgaaaaggagatatcacgttcataaaaaaaaagagaatgattttgaccattaaatcgtggtagatctagattaatactacaaatctgtttatggagaattcgaaatgagttctatatcgatccatgtgcgaccgcagttcaagccgagacactggcttgtttagaagggctgaggacaacaactgaatggattcatatgccaataattttgagactcacaatgcgaaggttgtccaagctctaatgcaacatggttcatcgatttcggaagaatggtacttagtaggagtagttcacgctgaattcggaagaatgcagtacttagtaggagcagttcacactagttttcgtaacaaactcgatcgagccatggcccatgcatgatggccccatgggagagacgcagcacggacacacggccggtacgtaccattcctgtcccgctcgattgcacggcgcacccgcgcgcgcggagagctgatcgaccgcctccgccggatccggctcatgcgcgggcgcgtcacctcgctctcgcggcgtacgtactgccaccgtggcaccaccgcgtgagtacggcacgtactggactatacacacggacacggccacacccacacgtacgtacgcgtacgcccacacggccgggcaaagcagcacgagccggacgtatctataatttttatataggtgatccaacatatatatatttatataccttaaatttagctaagctaaaaatataatttggtcaaatatgtatcgtaatactccgtatattaataaagaaccattgtttgttgaaatagaattaactggatttactagctttcttactcttcaaatatgccctctctgagaaatcacatttacatatttataccgagctagttacatgggaaattacacttgtagcctgcctagatcctactagattgaccgataggtgggccctccttgaggggcttccagtaatatcccggggacaggggcgcgggctgcgggctgcgcccattaaggcgacggtatggcgcgcctagggttcccggctccacgctattatccggataatgtcattttccaaataatagcattcttcggtctccgtctcgccgaccgagccatggtgtcagaggtggttgatggatgcttggtgcgctttaatggcgtcccatgctccaccatgtcctccggcttgggctccagacatccggagccgagtaatggcctcccctacggagcctgcctccgcatggcgatagcggggacttcgtccatgtctcgtccttctggctggcatccggatgcaatgccctcggaggatggagcaccccttcttagcctcctagggcctctgcaacggaggcttatgctatgagctggacggccgtagtagcgcaaaggtcagagccccccctcccacattttttttatttatttaaaagttttttttacgtatgtatatttatatacacattgggctaggattttttttcccagaaccacaccctggattcacacgtgatctgcaaaggggcacgtattttttcccactataatttctcccgcacgcggcacatcgatattccctccacttaatcatttccttatgtagcaatttgccgaataggatatgaaatatttgtaaaataataaaatgtgttatattctagactatattttttttatgagacaaatgaagtacatccaaaaaagagatgcacacgcgcacgtagtagataccgtacgtgcaatgttaatactaccagtacatacgacacaggagctagctggatggtactttctaacaaaaaccaaatctcgaagataaatttgaacacaacgtatgtacgtttagaatcatttctaagatttgatttttttttaatggaatagagggagtatgtggttgggcttaggtcgaatagtcgatgtgtgctttctgtagacacggtgtaattagcaagttagccattggctatttgctacattgacattttttttcggatgtgtgtgttaagttagcttagacccgaccttgtcgtgcatgacttccccgtggttgtcatgtcatcatcctctatatatatgcacggtttttatatcggaaaactcaaatcatcccttttatatcgctctctgtcctttggatgattaaaagtaagctactccctccgtttcgaaatgtttgacaccgttgattttttagcatatgtttgaccgttcgtcttattcaaaaacttttgtgaaatatgtaaaattatatgcctacataaaaatatatttaacaatgaatcaaatgatagaaaaggaattaataattacttaaattttttgaataagacgaacggtcaaacacgtgctaaaaagtcaacggcgtcaaacatttcgaaacggagggagtaggatgcatgatcattcgggctcatctggttaacattgtttctagtcattgtctcattgaactgccctgcatcctggtgtgtatgcatgacccgaacaggggcttgtttttcaaacagggttagtccaacgcgaggacctgtgcgctgcagaagcagccggttcagtgcatctcgatatttcagagcgagttatccgagccgccaaaccacagtatgcacgagtttggcatcagttcgacgtgaactgtggggcatgtaagatctactactgttcctgaaactacaagagctttctcgctcctgtctactttgatacagatttcgaatgaaaatattagaacagtactgcttgtttttcccgtaaaagaattgaagccacatatgactatatgagcatatctttgcgagattcaattacttttcggtgtaataagcatcttgttggtcgttagctttggtatcttgtggaactgatattgaatcattggcacggctgcttgtcttgtatctatcattcatctttttttcttcatttgaccagttaacataaagaaattttacttcgtagaagtccattggcaaaggtcagttttcaataatatcatactttctctctgctgaaatctgaacagatcgtcgagttgatcatttagcattgacaacgagatatttgaattttgagttttatgtatttttcttttgaaaaacagggtatgccaaattttgatgtcatctttattgcttctggattgaaagctacccccatataaataaaatgcgatgttttgcacgtgcaactccaccctcaaattaggtgtcattttaccttaattactctgtcttattgtttgacagctctcatatttgacaactctaatactccggtactccaatacaccgagatgcgctttatagcgcagtggcttggacttgctggcatgcacctcatcagctcaggttttagtctcctcgagcaagcttatcattttaccccgtttgatatacaaggatgaaatatattgttgcttttttgttaaaaccattgacaccaagttcagccttagtgtccaatttttttagtttcctctcttgctgttataacattatgaccattttattacaagccaaaaatcatgtcagtatctgtacggataattttgaaaaatgcaatgttaagaatcagacaagtagacgcagcaaaaatattgcactcggggtgttgaagaagtttaaccttttgatgtaatcggtgatgatagatcttaaggatgcatgtgtaattttgtgctagtgtataagcagatcagacgtaaacagactagtgaaattatttaataactatatatactcattcgttgacctaatggtcccaatcaaacagcaacttgatctacttgttgtccactcaacttagagaaaagcatatgcttacaaaagcttcaccaatctgacctgcaaaccgaaacgataaatctacatgagtgtgaaagatcatgcagggttttgcagctatctgacgctggctgaccacctgaaagagatttcagagttgctgctctccttagagaaatgaccaatcagacaagtatgctttagtactcaaaacacaggccctatcgctattagtgtcgtgatgattctgacaaagaagagtactgctgatttttgcatgcacagccccgacgtgattgccatttgtaacgctcagatacagtggctgcgactgatcgtcagtacagatttttgttaatccgaataccccatcgttcgcaaaaataatcctaataccccagctgaagttagccgcgtcaaaataaccacacacacataaaaaattcttggcagaaaagtctagcaaattgattgacgctgaagccaagacctaattaatgtcctttgatctttggcttctccagtcgtatatacgtttttagaagtagatggagcctgtagaactgtttggtttgactcctgctcaaaacttgacacttaaacctaacactgttgcatcataataggtgcaatgtcattttagtggtttttcctcaaggtaattaggtcacattcgcaggagttcagcttaagcttaagctaactaaggtacaacaactagagccttgaggcttctcccactaaaatatatatatatatatatatatatatatatatatatatatatatatatatatatatatatatatatattcacacacacacacacacacacacacagctatgcttgtataagaaatttatattaaattaaacccttttgcactgaaaacacatattgaaaaaattctttaaaactaatcagatgataccaacactgaatgtcaatgtgtcgtacgtctcaatccacatctaacaacaacactactgacaggatgtcaaactatatgaccgagagcattgctaagtcatcaactactactcattttacgtgattcagaagaaaaggctcgggcaagaatcttagtagctttgtgtaggatttgaacaacagggcctgcccataactctctcttcaaccactggcctagcggttattatcggtgaaaattaggtaaggccgggatttggacatggtaaataaagtccagagtttctgtcatctttgaggaatttggtaagatctgtgtcctcttcttcttctagtctgttggaaggatggatgacatcctgctgctgtaagccaagcgtcggggtagtgacgaaacggagcccagcagacaggacatggacagagcacattatcacaagtacgaggctgtaagcctgtaactattacggcgtttcgaaggcaaccgcttttctattcattcagaagcttttttcttgagagaggagagggaaagaaaggacgctttgagtggtactagcgcatcaactatcctgggacacaactatcaagctttgtctctatggttctactgtatgtgtgttctaaggtgaaagattgatgtgtgttttgagccacacaattaaactaatatagctttgttttacagtaaaagtgaaaaggtgtcacctttcctctccaggcaattctggatcaatgaatctcctgctttttagctacttttaccttgtgtgtcgatggcatatcgacgttgacctaacacgatgaatatctcagtttcatctgggtctgggtggcagcttaccaacgtgataatggccagaaaacaacccaaaaaaatcatactgctcgaaccagcaatttagcatccacaaaaccagccacagcagttctgaataccaaaatacatgttatatatacgcaacgccatgcaggggcagatctaccataagagcgagcaatttagggccattttggattggagctaaaatgtgacattaccaatttgttggtatcttgaatagtgatagtatatgtttcaattgtagccaaatcattgataatgcctattaacaatttggcactaatctagaactttcttctctctatcatcaatatttggctttaaattggtagcaattcaaatatgtatcatgcatctctaccctaccaaaaaaattggtagtgccaaaatatgccaaaaatttggcaagggtaaagaaccaaacagccccttagcatccacaaaaccagcaaaagcagttctgaataccaagaccgagtttagatccaaaatttttcttcaaactttcaacttttccatcacattaaaactttctacacacacaaacttccaactttttatcatatcgttcaaatttcaaccaaacttttaattttagcgtgaactaaacacaccccaaaatacacgtgatttatacgcgacgccatgcaaaggcagatctaccataagagcggtggaggcagagcttgagcctccactacttacgcatgaaaactctaactttttttttccatacgtagataggaagggatatttttttttcgatttattcagatcctctgccttttttatccatcactgacatcatgaatggggtaagggtgcgcctgggagatgaataaccagcagccgtgggcgccgccacgccaacaacgtggcggtgaattcatggctggcggtgaccgacgccgacgcgccgcggcgaacccatgcaaaatcgcgggatgccgccgggtcgccggcggacgattcgtgctgcctaacgcgccgttccgctctgtgcggcggaatgcggcccatatgtatggctagcgtgcgggccaaaattatggactgtggactgtggtgaacgtgtggcggcctatataaggaataagttcaccagaggtccctcaatttaacagcgagatttttttatgccgcttaaccacaaaaccagaaatgtggacctctaaactcatataaaccgttcaaaggaggtcccatggcaatacagggggcggctccaggggtagtccaggtggtccttggaccaccctggattttggcccaggagcccctcccccctccccgcgacggcccaaacgaaagaaagcccaacagagactaggtttagtcggtagcagaggagagcctcagaggcgcaccgcgcaggcgcgctcgccgctccgctccaatcctcccccaaatcgcgtcgcgtcgccgcttctgtctcgtctccgccactccctccgatctccccgctcctcgtctcctcctcctctcgctctgcggcgcagcggcaggtgccagcgccatcgcccatcggccgcccgggcccgacgcggcaacaccccggccggcggcggccacgattctacccccgccgcccctcatggcggcgacggcgcgtcggcgtcgggtccctctccctcctgctcgacgagtcgacggctctgctccagcctccctctagtgccctactaccctgcgcccctgccccttgcccccggccgaccggcccctgctagtgcatcggcataggtgagctactcattttagtcttactttgaatacatcggtcatatatgaatgaaaaatgtggatggaaaaatgtgattgaaaactgaaacttagatttttttaagcaagatattgtaagatatttgaattatttatgttgtagctttcgcaacttcgaacttaaatgttggttttaattgttgtagctatcttgcaatatttaaattatatttccactgtatttgacatatttgacttgattttgtaacatcgtgacaatttgagacgccaagtaggaccacccaacgattcgttcctggagctgccactgaggccggcagcagagagggcggagcggcgatgggcgggcggcaggcgagcgcggcggcgggtttgcgcggcaggcaagcacggcttgcgggcggagcagcggcggcatggagcggcgctgggatgcgggcagagcggtgatgggcggcggcgggcgagcagacgagcacggcaggcggaggagggggccgctacggcggaggtggccgaaggaggagcgtggcggtggtgggcgagctccgccagcctactcagcccaccacgttgccgaagaaagggaggagcatggcgacaacggtggtgaggcagacgaactccgagcgcgaagggccccacgcggagctccttggcgatgaacgtgctgtccggccaccggcaggacgcctagcgctcgacgaagacgaagattggttggacgaacacctggtaggcgccgacgaggtgcacgacgatggtgaacccgaaccccatgaggaggttgtccggcaacgcgtagcccatgcacccacatagcatgtagaacaccgtcgtcgtcaccacgctcagcctcgtcgcgctcttcatcaccttcgcctccaacggtggcggcgccttgatcgtgtcctaaacaacaaaacagagcaagcagcggtgagcaaacaaggtttggttagagaaaaaaaaacagagcaaattaactttgtagctaatggtgttagtctcactcacttgtatctcgatgaggatgttggagaaggagtaggcgaaggtgatgtcactgaatgcctgcaggctgtgccacaccttctgcgttgagctgacaccgacgccgatgatgatgtcggtgaggctgccatggatcccgccattggctacaaattcagagctcatcacggtaagcaaagacaaattaaagaaccagaatatctgtatgtgacagaaggaagaattaatggacgttactcgagctgcggcacgggtcgccatggccgttgtggtgtaagggttactcgcgctcgtctgctcgcccgccgtcgtgctcgtccgctctaaccgccaccgtgctcggccgctcgcccgccgtcgctcggctgccgtgctcgcacgcctccgcgctcgcccgctgcccgcccatcgctgagataaagagaagagaaggaaaagaaaagaaaagaaagaaaatgtgcaactgacatgtggaccccacgtacttttttatttttttgctgaataggatgccacgtcagcgaaaccacccacatatactgccatgggacctcctttaaacgatttgtatgagttgaggatacacatttctggttttatggttaagggactttaaaaaatctcgctgttaagttgagggaccctcggtgaacttattcccctatataatatgggccggattgggctgtcgtgatctatgcggcctttggggaagtttcccaaaaggaggagccttttgggcatcggtagattttgctatagatttgtcgcgtgattttttctctcggatttgtcgttttttaggatgttcgataagtgccaagattcgtgcacatatagcgctgggaatccgcataggattcagtcggacggttagaggcgctaatttctttttttgcgctctaaaaaattgatatgcacgctgttctctctcgttctctctcaattgaaactaaaataaaaataaaatacaaaattacagttctatataactaaaattacatttataaattcatttgatatgacatgtaagtacactgtaattttgataataatattgtgtaagtaaatatctatttgttattttcttcaaaatataaaattacagtcctatataactaaaattacatttgtaaattcaattgatatgacatgtaagtgcactataattttgataacaatgttgtgtaagtaaatatctatttgttattttctttaatatatataattatagtcctatataactaaaattacatttgtaaattcagttgatatgacatgtaagtgcattgtaattttgataaaagtattgtgtaactaaatatgtatttttattttcttttgtggtccgttggatgtaaatttaagggtagaaaaaatttgggtgattttttcttagaaatcacccgacaaatagatagacaatcccggcatcggttattcacttttggctgcctggatatgagcgggtggggaataagttcaactgacatccctaaactttacatctagtctgtctatggtgcctactccgcaataccagaaatctctactcctcaactatcacaaaccgtgaaagaaaaaagaactcgaggggcgttgctgcagaggaggcggcgaacgcctccacggcccccgcggtggacgagctcgtgggcgcgctgtcgcggtcgcggcagcggcggcgaacgagattcccaccacgcgggactgcctccgccctttggcaacggccctcggaatcaacgctgatggcagatgccaccgcaatagggatgacaaggcgagcggctcgacgatggggcacgaggcatgggcggagcagcgcatggccggtgatggctgcggaccgcatgacgagcgcgtcggtgtcgcagcgggtgggtgaggtggtccgtctgctggtccgacaccatgtcgacatcgcctcgcattgtcattcttgtcaatcccacaggctcgccggtcatgcctgtcgatcggaggcaaggattgaggacgacactaatgggatgccgtcgcagaaagagaggggggcgccgatgacggagggagtgggactgtgggaggccggtgagctccctccaccttctcagcagctgccgcctcctgcctgcttcacccgccgtcgttccacccaccacactcatccactgtcgtcccctgcctgcttcacccaccgccgctccgcccgctgtcgcactagcccgccatcgctctgccctctgccgccagcagcctctcttgctgaagaaaagaagagaagagaagaagaaaagagaataagaagatatgcgaaccccactttttttcttctcacttacaagtgggcccataattttttaattattttttgatgactaggatgccacatcagcgtaaccatagaaccatacttctataggacccaaattacaaggttttgaagatttctgtattgagattagagatatcctaaagagtaaagttcatcaccggtccctaaacttgtaccgttgtgccatcccagtccctaaactcgcaaatcgaccgttaaggttctcaaacttattcgacgtttaggtcctctaacttgttcagttgtgtcactccggttcctaaataggacggtttaaaaactttatatcaaaaataattcataacttttacatgtgaactctcatgaagacaaactttatattaaaattgtagtcctcgacgcaacctacaactttgtagttgaaaagtttttgaattaaaactgtttagggtcccaaaatattgtgtcatgtttatagattttgaaattttaattttaaagttacattttgggacaaaaaatgacttaaaattaaaaaaaatcaactacaaagttctagttcgcatcgagggctacaaggttgatataaagtttgtcttcattagagttcacatgaaaaagttatgaattatttttaaatataaagtctttagactgtcctatttggcccagatgatatttaaatccaagtttagggaccggggtgacacaactgaacaagttggaggacctaaacgagtgatctataagtttagggaccgggatgacacagtcgaacaagtttgaggacctgaacggtcgatttgcgagtttagggaccgggatgacacaacggtacaagtttagggatcggtgatggactttaccctgtcgtaaagactcgacgtaaagttgagggatgactggtgaacttattctgcgcgggttgcggcatcttctgcacgcgcagcacacgcctgggtcaagaggcccaagattggaatcggtgggttgatatctagaaatgtttatactaggaacgaagtagtagtatttttttgaggcaaaggaacgaagtagtataacataggagtattgtggcagatttgccatttgccagattggcagaagttgaacgcgtattgaggcaagaaaagcgtacgagtatttgcatgccgtcttatgcacgcattctactaatacctctatcccaaaatacttattgctttgcgtatttttttaacttttgatcatttatcttatttaaaaaattatgaaattattatttattttatctgtgacttgctttattatcaaaaataacttaacaattttgtatatttgtacaattttttaaataagacgaatactcaaacattgtactaataaagttaaagcggtcactaatttagtacggtagtacggagatagcactaagacttcgatgactacgagtgtgcaatctcaggcgtgacgcttgcgtggctgtgtgctagtgtacgtgtgcgtccactgttgtaatctcgagagacaaacggggacctccacctactggccgttggtgtcgcactatcctactcggctagtattctcctttccgtctcccaccgacacgccatgcatgacggttgcagtgcaggctccacaaacaaatggccagttggccaccagcttcaactcggcatctccaaaaattttatccacctgaactcgaagataccgtatttgcgtcccctttgcttgcattccaattcaaacaccagaccgaacgcccgctcccatttccgccgcatttaagcgctctccggcctaactgtcctatgcgctagtcgcctccgaccaaacgcgacagcttcatttcagatcagagaccaccacgctcccccgcctacaaagagccaaaatgcatcggcagcttagcctctcaccggggccgaagcagcagcagcacgacgacggcggcaacatcggcatcggcagcgacgcggcggaggtgatggcggtgccggaggagtcgtcggcggccaagggccggtcggtcagggaggagaggaccatccacctcatcccgctgctcaccttcctctgcttcctcctcctcttcctcttctcccacgacccttcctccgctggtacgctcagattcattctgtactgcactgcactagctacacctgaaatgtttgattctttattgtgtacttgggttgattcttttgccttttttgtgccttgtttttcaaagatatgtcgagcttcagggacggagggaacggtggcaacaggaggctgaggatgctgtaaacttctagcatcaattattgtcagctatgttttttttttctgatccgttttgctttgcgaatttggatcagattttgtgctgtatttgctctcaaatatgcgactgcgtacgcagctacttaagcagcagtaattagtatttgtaatctgcaactttatgcaatcttttggtgagttcttaaatcttaatcgtttgaattgcctctgaagaataagtcggggacatggcataaggagaatatatgcggttatatgctcctaccattcattgatacagtagttgatgtaaccacaggtggaacagatgcagtgaggcatatggcctacttttgccaatgttctgtgctgcttgatggagggtgatggtccaactaagcttaagccttatccacaaatcaacagttcaagtagaaattcatggtgttcaataggccatgtttgcacaggaaattggatacaaaagtgtgtttgcagcaagagtctgggaatgcttgatttgagctaagaatacaactgttttgcatataagaaaattttgcatcataaaagtacctagaatacaaatgtaggtcgaaacggcacaaaaacaacaacaaaaaggtgatcattacaatcttaaaatctggaaacaattgtaaacgatatctgaaagatggcaagttccaaattgtaagctgaataaaaaacatcactggcatcccatgtccatatttacattctttgaatcgaacacatcatcagatgaatgtaaatatggattctttggaggaggaatcagtagatcgtggccgtgcggacaggaatggttacagggcttcctgggagatgagttttcgacaattcgctgtccgggtgcttgcgttgttttctttgctcggccatcgtaaatctttcaggtatatcggccttaggtaaatcagcctactgatgcttatgctccatcccatctatttcagcattttcttgcgcatgggccactaggattgcagcctcctgattttccagctcccgtttacccatttcaggttttctggcaggtaacactttggcccgtcaccttcctatgcttgccctcttgtacaaactcttcagagcttacagcagaatagtcctttgccagttcaccatctttgatgcttgccatcctactcagccaccataaatttccctttgagggctgctacaaaacgggatcccgttgcaacgggataggcatattaactattctcttgcacgagtatcacaggtatcaggtcctaggtatcataggtatcgggtaacaggtatcacaggtatcgggtggtatcaggtaccatgcagctagtaccacaacaggtatcaggtattaagtactgtctcatagaagggtatccggttccaatgggatatcgttgtctaggttttttttgtttccctttccttggttgttggtttaaaaaaaagggataagtccattttgcaccccccaaacttttatgtttgtctaaaatacacccccaaattataaaaccaggtatttgacaccctccaactatcaaaaccggacattttaccccctaaagctgttttagacttgttttggacgccatgtcagcataggtctcaccagtcaaacaatcctccttttttcccctaagctcgctgagaagccggcgagctccctccctccgtcagcttcgtccccggcattctccctccctccatccctccacggctccacccacccaccacccccacccccttgatgatccatcaacatccatgccgaggggggagatgctgtggcgagtggcgagcgatgacgcgagatatcatctgatggggcggcgcctggaatagcgagaggtcgaggagatcattgccgcctccctcacgaatcacaagcctgttctccccgcgcgggagacgcggacctcgccggagccacacgcacgaggagtcatcccagcatagcatcgttgccgcctggttgaggatgaggagtcactcggggaggaggagctcgagctcaccagcgacaacaaacgcgcatctgtcttcgtttccgccgcaacagcgacgccacggcccctgtcccttcatccccgtgctcgtccccaccccttcatctccccatcttctccaatcttggccgagggggttggctctactgtgctcttcagcggcgagtgagtagagggagggaagagagggaaacgcaacgctagataatggacgcggaagtcgaggacggtgcgaccagcggcaatggatggatgcgaagaacaggatcaacacaaccggtgtccgtgagctagctccgtaatcaccggttgcctagctccatttgcacaaccgaagactttgaatggcatgtcaaaaaaaaaaaagaagattggacccaaaaacaattaatctgaatgccatgtcatttgccatgcaggctaaaaccgtctgatctgaaacgagggggtcatttaaacggttttgataattggagggtgtcaaatacccggttttatagtttaggggtgtattttagacaaaggtaaaagtttgggggattaaaatggacttatccctaaaaaaggggggggggggggggggaggttggcaacgtgggtattcttctcttgggcctcaaaacccaatgcctcgctcaccaaagcacacgcttccgcttctcttcccagtggccattgcgtcggcggcggagggatggcgaaggccggtggggggatgatctgggcgacggcggaggacctggcgcggagccggccggtggtgctgtcgctgtacaggcagatcctgcgggcgctgaactcgccggcgctgccgctggggcacgcggcgcggctggcgaagaaggcggagtgccgcgccatcttcatcttcgccgccgaggagaggtcgatccacaacatccgcgatctcctcgacgccgcgcgccacaccctcggcctcctccaccgcggccgcgtcccttgaggttgggagaagctcgcgtcctacaacaatctagggttcttgcttattctagatcgtaatattcagttcgtctttgttggagagaccatactgatatgctgtacacatgcagaacatatccattccataaccgaaattaagttatccgtacgaatctattttcagtggagtcaatgtgctgttattcttagatttgagatgtaaagttttcgatagtatgaactggtaaaaagaaaatttgaaacattcaagtaccaacatatgcctttgcattgcccaaatgacctggtatattacagcatttatgttccagcattgttcaattcttttgccttgtgcgcgatgcaatatcaacctataacctttacacataccagaggatttacttccatgaagctggaatctaaagactgtaaacataactcgaatggatcataactatcctgcagctgtaccttgtagcatgaagtagagatttagcttagaacacagggcaaacgcttgttggacccaagtcaaccccttttgcagtgggacatgtggccagtgggcagtgttctcctgccgtgccccaccagtcgatgctccggttctccatggatagtgagaagtacagcagcaccgccatgaaagccacgccagcgtcgagtgcggcagagagaatgtagttgtacctctcccaccacttcttccggtaccggaacacgaagaaattgaagatggtaccaaagagcagccaagagttgtaattcacagccgtcgccggtggcattgaggctgtcgcgccgatgagcactggtaagttagtcagtgttatccatttcttgtttgggaacatcttgtggaagatgtacacgataacagggcctgctgcgccgatgaggaagaaccagttgagggcactgtagttgccatgtggtccaaagatgcggattgggccaatgaggccccaaatgaccgatgcatcgaagaagactcggtcgttggggcatgtccatgggctgtcagctgggagcgaatcctgacaaatgtcatggatggagccgagcagccaccatgccaccccaaggttgaccgtgccggccacaattgtgccaataaactgagtaaaaacagtaccctcaaggttagtaaaatatgtcgtcttgcatgctaacatggttgtcaacaaatccttatgagtgagttgggacttctgtttatacctgaactaggaacatggattttgggggaatcttcatatagtggccaagtttgaagtctgagaggaaggcaatagcctgagacatgctcatgtagccatacaccttgaaacagacgttggcgatgggatgaccagggattatcaacccaatggcatactccgtgatgacgttcagaccaggtgtctgtagatgacattttaaatcattttcagattttgttacttaagctattaaaatgcagtagagtgcactgacagttctgttctagtgaaatgcctcaaattctaacatagcttgcctggttggttgtcgcagagatgatgctgatgggtagggtgaagatgaaggccatgccacaggcaaatagtagaccccaccatggaagctggacctcatgcttcaggacagtgcagaggataagtgccactgtcatcgaaagcgccatcagtgagtagaaccaccacactggtatgtcatcgtacttcttcatcagcctagtgtggatatcaggcttctccttctgcgaagctcgaaaacggtgatagatttccctgcacatttgtttgtccggttcagatacagaagatgtaccgtgtgattgtttcatgtatttatgtactgatcagagaatatcttactttccatagaagaggccgacgtgggtgacagtggaggcaatggtggcaaaacttagaccataagcgagcgcgaagaacacactgaggttgatcctgccaagcttattgtaagcatcgatatcaagctcaaacttgtcgttcacgatggctgtgatatcgtagctcgtgccattggacatgaataggtgcgaggagaagatggggaatgtcttggcattgtacaggtcgaaaccccagtatgctatgggaacgagcacatagaggaagagcacgaagccgacgaagatgttggcggtggcaaagaagggcgagatgagcgggctgaagaggaaggaagagatagctgtccagtcgagcgagaaggccccaacgcccaagcccttcaagccggagcccagctgttgcgccgtgacggacttggagaagacccagcacacccatgagatggatgtcagcgtcgggaagaggtaacccggtacggcgtaccaagcaaagctgcagatgagcgccaccaggaagaacttggagcgggatatctgccgtgacccatggggcaactcatccttctcgtgcagtgcccttagacaaacattgagatgtgtaaagattagatacgacgtcataaaaatatcaaatatttaggcaatatgtactagttataagtactttatgcaacagagctgttgtgttctatctagtactactgttctagctgcatgattcatccatcaccattgacaagagtatactattattcccaacgttgttctgaatgttattattacgcagactactattatgtgatgctgggtcctctacgtgcatacagacgagacggcatgtcgtatgcagatgcagccacagaaacaaaagataaaatcgcagtaggcagcagattgattggctttgtcctcgcgcccgcagtctcctcgtccagaagaaaaggatatgcatcccatccagtactccattcccaactccatgactcaccacacacatgatgaaacgcgagggcttgcgaagcagcatgtgcagcaatcccgtcttttccgggcaacttgtgcatggatggagcccttggaccagcaattgggttgcacgcttgcacgacgcacaccgcaccatacgcccccccgggcaatgtttcaaacagaaagtctcccaatccgtctcgtcgtctcgactcacgttgaatctcgccgcgcaggcgccggtgcaagttaggcgtcgcggccacacgcgcgttcacatcgcgcgcgtcggcgccggagtcgcctgcagaaaactggagcccaaccacgccctttcttctgtctagcgctgacgaagaaaacgaccgtacccatctcacccacgcatcgccctgtccattttggcttcgttcattggactttgactctcgctgaattaatgtggaagtatcgcatgagtccaaagaatcaacgttttctgaaagctgcctgctactactgttgttcgttattctattccatcatctaaaaaaaactactgttgttcgttttcggatgtaccagcctgatcattaatctaaattaatccggtaagaacgggatcagttgacgtgacgagatggggtgacaacttgacattacactgtataagtttaaggtcggagcgacgtaaacgtaatggtaacatacctaatctctagtactatagcttaactactgtgtctgtagctaatgtgtctccttcagaagaggtactaacttcactgctacctccgtcccaaaatattgatgaggaaaagaatattttgcaagagaggcaaattagaatactgcaaaacaaggcgcaggattaggagaccgtcagaattattcaactaaaatggcgtatggatttcactggtcagtgagtaggacattttggaatctctgatgacactagagatgattaatgccaagcttacgtgagccttaccggtacaatgttgccactgcaaaatcaaaggatgggtcggctagattcagagaaaccgtttggtgtgaataatggcagttgagttacaggttgatctagaaaccttttttctcctcagaggatagacatgtggactgtaaccacatagtgagtaaaaagaagcccttctttctaaagtcaaaattacagcgtttggtctaattcagggagaatatcattatctgatctgcaatcactgagtctaaacaaactcgatcccctccttaacgggcttaactccttattataaaccatgcgtgcaccatcatcagtccatctcctaagcaatcactgagtctaaacgaaatcgatggcctccttattctaaactatgcgtgcagcgtgcaccaccaatccaccatcagtcggctagataactcctaccaaatcttattgggaaaagcaacagtgtgttttcatttgtctttttttttctgtcagtgcatgttttaaaacaaaacgtgtcatcggagcgtgcaaagacagaattatgaaatctcaagtctgaacacccctccaaataaagaatccaatttgcattggagaatcaggagtatatctttctccaatcactcataatctggcagcgcaataattgcggggattccatcatcatctgctttatccatcaacctatccagtgtgtacccctcccctcccacgttcatggtgggggctcccacatcagtgtcgatgacaagagagaaaaagagaccatctaactgaaaatgcccactgcctgggcagcctggctaggtactcaatgccccagatgctctctctttctctctcaatttaatcgccaccacttttgtttctttaattccgggttagatcagattctcaatctgaactgggccaacactttgtactagtatatctatatagtgtacgtacatgcttcttctgaaaatggtcgagaacgacgagaagaacaaagaacctgggtttttggttccatcgctgccatttttttcgtcaggtcacggctttctccatcgactttatcgatgtctaacgggaaaaaaaacatcacaaaaaagtaaaagctgtagtacggtgctactactataggtgtggcaactggcaagccatgcgcgacgcgagacttaggacaaaccaatcaaagcatggcgagagaaaaaaaagagaaatgacgtaaaaacttatttaaaagagcgcaatgctatgttcgccggcctccggaattccaaccaaaacccagactgtaactgtgatggcaaaaagaacgtagcgtaaaacctactaccgtttctgttgagaagaattaacaaagagaggagaagaaactgaagtagaacgcgagcaggagcagtgaaggtgaagcgagctagtagctactcaccggaagagcgagacctggacgagcgtccccggccaccacatgtgcgccggctccaccacgaacttgcgcatcagccccgcccacccgtacccaagcacctaaatcatcatgctcggttaatcgcaagaacatgagatttctgatcaaatgttgcaaatctgaaatggattaggctgcaaatggtttgacaatattgcctaatgcctacctgggtggtgatgatgaggagccaggcggcgacgaaggagatggagcgcttgtagaaggcgcggatgatgtcgacgatcatgacggcgtaggcgttgccgttgccgaaggcgcagccggcgttggcgaagatggagatgagcacgtgctccttcatgttgaaggggcccgggttgaggctccactcgccgccgccgagcagcgcgggggcgcggaacgcgcggcgcggcagcacgcgcgccaggaagtggcccaccggcagcgacgccacctgcaccgtgatctgcgtcacgatgagcggctcggtgcggtaggagaagaactggttgaggaagctcaagagcgcgcaggagaggaggccgatgctccacatccggaacgtccacaccggcagcgccgtgtcgtcgccggccggcaccgtcagccgcacctcctcgatcggcgacgtctcctcctcgtcttccccggcggcggcggcggcgaggccgcgctcgtccgccgctgcctcacccattgcgcgtgacgcggggggttaatgcctcccgcttagctctgcacaggagagagagagctagtgtagcagagagaagcccgtgcgttgtgttgcgcttaccggagcccttttgaaggaactcagtcttagtacagatacagatggcaagaaccattgaagtagtagggtttttttttttttgccatactaaagagagtatatacgtgctaccttcaattaatactttcttcttctgaaatagtatgagcatttcctatgcacctggacgccgtttgcctggctatgtatatggacggccttatctgtttagccagaaatgcttatggtaataacttagaaagaggttaaaaaggaaacaattgatacacgttattatcctttccagacatatatgtgcatgcaggagaaacaattattgccaagcatgtatacctactaaaagaaatagaattaacttgagtatagaaacctgtaatgtatatccaaaccatccggctagaagatgtggccagaacattgatattttaaacattaaaacatttatggatgtaatttcatcccaattttttttaaaaaaaatacaacaaaacaatatacccattccaacggaataaatgacgtcagcatgattccacgtaccagatgtcactggtggagaaagcgtttgtagtcccggttcgtaacccccctttagtcccggtttccaaaccgggactactaatccgggactaaagatcgctatctttagtcccgggtgaaataaccgggattaaagataacactaaccgggactaaagatcgagctgacctttttttttgcatggccctgttgctgcatggtttatatatatgtatgtatgtatgtatgtatgtatatatatatgtatgtatatatatatatatatatatatatatatatatatatatatatatatatatatatgtgtgtgtgtgtgtgtgtgtgtgtgtgtgtgtgtgtgtgtgtgtgtgtgtgtgtgtgtgtgtgtgtgtgtgtgtgtgtgtgtgtgtgtgtgtgtgtgtgtgtgtgtgtgtgtgtgtgtgtgtgtgtgtgtgtgtgtgtgtgtgtgtgtgtgtgtgtgtgtgtgtgtgtgtatatatatatttacattaaagaaaatgtgtacacatgcatatagaaaaatagacatgtattaattacaatccattatgatgtcctagctagctacgatttcgatgtagcagtagtcgttatctcagaagctaaggacctatgaattgtatttccgtcgtagtagaattcacccttgggatcaaggatttgttcgttgatgaatcccacgagttgttcttgaaccgccgcgataaattccttgtgtgtgatcaggttatccctcatgcgaataaactatatgaatgtatgaaattaattagtaattaaacaacaaatcgatacgtaatgaaattttgaatttatttgtacatacatcgagctctcttgtggtgatgatttggtctgcaaggcagtggcaatattcgcacacgtagtagccgcacaagttagttccctgcttttgctttgcgcactataaataaatgacaaacggcgagagatctaattaatatacacctgtatgtatgtgaattggagattcaatataaatgtagagcatgtgtactcatatgaaaattgaacttccgcctaagtctttctctccatttgccgcggaccaaatgacggaaccgataccaagccctacatggagtttaaagctatgattcgtagtagcaattaattataacaagattcttaattaacataggaacttatgatagtacctgtctataagtttgaaaaccttgtcaaacgtagactcttttttatccattgagtcatatacgttgacggtgcaggcctccaggtcgaagagtaaaagcacctagtggaatctgcaatgtgcgtgggatgcattacatatgaaacacttagcatgttcgtacgggaatgcaatttggtataggaagatagtaaaattaaactaattctgtgttgtacggcaacagtatgaacgtcttgtaatgctgcgcctttaggagatggacgaaattgtcctctgtggcttgcggatactagtcgagcattgcgacgtttactttccgagggtcgatgaatctagtataaaaccccccgttgtcaggccctttgaatctccattctacaacgataaaaggaagtatatattatatatagtctacttatatacaaggacctaattaattaaaggaaacgtaataagaaatctaactgaacgatacttataaaatccagcaactcataatagatacgtcgagggcgtccagctggtatagttcgtagatacccttgaaattgatccagagaatgtcatctccttgcaagaagtccgtgtccctgatcctcgctccgatcatctctctaccggtggcgctcatctccatgtacagttgatggaacttgtacatttgtgtgggtagggactgcagctgcttaggcttgacaagcggtttaccgagtttgtacatgtattttacttccgccttttcgattggtgcgcctcgtagcaattgatccgtagttagcccggtgtcattaataaattcttgtattccaaaatcttcaccggtcaccaatggctcgatctcctggtttggttgctctccaagctaagggactggtttggactttctagaagatgctttcttgagtgttcactcatagtccgatagctttatggcctccttggcaggtgcagacatacccttgaagaagttcctgacactcgggtctataggaatcttcttttctggacttcgaggcttcaattgtctcctgacttctgatgacacataagcgtcaagctcctcttgcgtgcaatcgtaccccgggtccttgttcttggcggcgtcaactttcgccttcttcgttgcccttgtgggggcaggcggtggagcttggggggcccttgacttggaaggtgccggacgaggagcttgcggaggagtcggtgtaggagcctgaggaggagtcggtgcaggagcctgaggaggagtcggtgtaggagcctgaggtggagacggtgctggagcatgaggaggagacggtgcaggagcctgaggaggagatggcggagccggaggagatggtgcacgagacgccgcttgtcgcgcagggaggatgatgtaccgcttgcgccatagtataatggcgtggcttgtgtctcgtagatgcgtctcaccgtctagtccaggtaatccaactcgaggtcctcgtacgcgccttcgaccaactcaacttcgaccttggagtatcctgctggaatcggcctgcagtggtaagtacctgaagggtccattgggatgaccatgcccgacgccaccttcacgtggtgagaggttatttattagtaatcaacatatataagcagcaacttgcggaatggacaaatctaaaatctataaactacgagcttacctttattgataagttcttgaagggaatatgcagctcacatggtgtccgctgagtgatgtcatcaacggggcaggtggttttatcctgggtttgcatggcgtccatgctctgtgatcctacctgccccgttgaggcgcagctgctacgatttcctgaagggctcaccattgcaggaggaatggtcggctggtgatcatgggaccgatgtgcggccatgcgttcatcaaccttcattgccaccttctcttgcatgctgagctcgtagctcgataccctgtactcaagatctgcaatcttcgcctcggtatctctcttgctcctcatccgactcctgtacgtgtggatgtcctccttgaacccaatcttccaaggaatcacccctttccctcgtgttcgtcctggatgctctggagtctgcagggcgagtgacagctcgtctgtagcgcccgttccgtcgtggcgcctagcgggaaaattatctcttaaaaaccctaattgcgaaatttgtttctttgcttgttgtctagtgtccgtgccatctcaagatctcaatccccgatctatcgtcgagttcaattccgaatccaaatccttccaaaatcaattcctccgcaaaagtctattttgcctcccccgaggtcgatgggccgaatctcgctcggcccatcttcccctcttccccggcccatctctccctctccccccgggcgctctcccgctctctctctctctctctctctctctctctctctctcttccccgcccgcacgctgctcgcgcgtgcgagagccgccccgagcgcctctctccccgctcccccctccgccccgcccgcgcgccgcgcgcgcgtgcgcgggagtcgcccgcgccgagcgcccctcccctcgcgcgagctccccgctcgcaaagacgcttcccgcgcgccgtgttcgcgtgcgcgcgccctcgcggacgccgcccgttgtttcccgcgcgcgcgccgagtggccgaccgcccggtcgccgccgtcgtcagcgtctgccgcgcctgtcgccagtgtcgccgctccgctccaaaccgcccgccgtcatcgccgtcgtcaccgcccggcccccgccactccgcgcgcaagccgccaagggaaggaagctgcgcccctcctctctctgccgcgttgcccccgctcccctccccctttttcccgaatcggcaaaggggcaagccccctttctccccctccttttcccctttttcctcctcgccggcgtcatcctccctgtcgccgctttggccgcgaccgccgagcgccagctcgcgcccttgaccgccctaagtcggttcccaaaccgacattgccatcctataaacccaagcctccccctttcccttcctctcacattcgcctcctcaccgttgccgccgcccccgtgctctgtctcgcctccgccgtccatcgccaagcgccgggagagccggtgcgttcgtggacgcggaaggggactctgggtgctcgtctccttcctcttccccggcccgaggccggagagattactcccgcgccgtcggcctctcgtcacagcgcccctcctcttctcggtgatgtctctctccgttcttcctcctcgctccatctcctccccctagctttcggtagtagcttgagtagcctccccatagttagccggcgccgccccgaccgttgccgtcgctcgccgtgtgttcgccgccgtcgccgctcgagctccgtagaacccgctcgtcgccggcctcgctcggcgtagttccgcccaatccgacgctagcgtcgagttcccgaagccgcatagatgctctcaccgccgggaatcgacctctcgtgacctcgtcgccgtttccctcttctcccgccgccggttgccgccgccgcaatccgccgccgttgagcaacctccggcgaatccgagccgttggctcgcctccccttgtcacgtgcaaccgcccggtgtgctcgctgttgcccgtatcactgtggttcgctccgccgctcgccgctgtcgtccgccgtccgttccggccggcgtcgtcgtctacctcccgccggcccgcgtggctgccacgtaggcgccacgtcggcgccacctcggccgcgaccggatcagccgacccggccagccgctccctccgtttttttcccccgtgcgcatggtccgcggtgagccgtgaggctgcgcgtgggcccgccgcatccgttcctccgcgaaccgcgcgcgtgcaccgcgtcccagccccgcccgcgcgcgtacgccgcaaactccctccgcacggtgagccgagccgctgacaagcgggtcccacccgggaccgcgcgcggtgagcccggtccaccggctctctctcccctcccctcccgcgcgcgcgcttgggccgttttgggccggccggcccgttaagctcggccgagccgctccatttaccttaggccgcgccctagccgcccgtggaaaagtctgatttccatccctcttttcttttcttttcttttcttttcttttccaaaaaggatttaattaaatccttttcctttagaccaaaaatccaataatcttagaaattcaatatcttcccaaccgtaaatccgtttgactccgttcaacttccaaaattcctcaaatctcgagatctatctaatggcacgcttagaggtcattaatagggctttattttcgccgtttgttgagttgttccgtttcgcgtgtagttccggagcctgaagacccgcagtgcgaggatttcgaggatcaagctccagatctcgagcaaggcaagccacctttgaacatcttgagcctatatttgaaatttaattatgttgcttgaaaaatattatgcattgataggatcgcacttaatcttttgtcccgtctgcaagacagattggcggacttacctaaattgttgcatttgatcctttccttgttaattgttacagcatgtccccttgtaaccacctagttgcgtcttgatattcgtgcatcctgtgcgagtatcgacggacgccttcaaacttataatctgaataacaacttgggtaaaacttgggttttacgaaagatttggaaaacccgacacctgggtcggtgcttgcgaactaaatgaatttccaaaaccgcggaccggggaacgtaccgggtgtacggtttcccgctctcgcacttaaggaccgattccttggaatttcatccaaacataagacaagtacgaccacatgggtggaatgggacacccctggctgagtaactagcttatcaggggagccttgatgccgagagacatgtggattcgccggggtggtgtcggggaggacccctgggcttcctggcacagtatggtctgggacctaacctgttgttggtctgggacccctctcgtcggcatatggtaaacctgtgtcggctttcgaaatgccttgtcatgaaagcttggaggtctcccgacgtggctgatccccacgggctgggtgacccgggttagtaatgtcgtgtgggtaaagtgtaccccctctgcaaaggttaacaaactgttcgaacagccgtgcccacggtcatgggcggatgtgaggtgattcctagcgtagttttgtttgactactgtttgtgaaattgctgttgtgaaaaggggttcgatgtttgaaaaatctgcagctgatgggatcaactaggcccgggtggctgtttgaaaagttgtaggcccgggtggccgtttgaaaagttgttggcccgggtggccgtttgaaaagctgttggccgggtgccaaccctgtttcaagatctaaagactgatacattgcacatactccgaccggacgagacgcactgtcttatccgtgtcgtttgagaagcactcacttagttgtttttagaaaagagtttaaataaaataaattgcgaaaacaacagcctttccttgaagcctgcattaaacacttaattcccatggcttgctgagtactcccgtactcacccttgctctatataaataccccccccagttgctgaagaagatgaagcagatcctgctgatgaggagttcttccaggagcaagccggctacgatgagttttagggtttcggcctagttcccaagtcgcgcctgtgtgtttggtccaagtcatggcttccgtttcccttttgtaatgcagttgtgagctcgggatctgtccgcagcccaacatgactgtacctctactctataataaagagacctctgttgctgtgatattctgtctccctgtgataccagcactgtttcctgggactggtatcgattaacaggttaaattggagcgtcacgggctagttccggtcgggactagttcggggcgtgacaagagatggtatcagagcacaggcttggccctagggcgaaacccgacgcttaggacgaccctaaggatactaagttcaaaactacttgcgaaaagctaaggtttcttttattttctttattttctatagttgtttccaaaatggttactgatctttctccctctttcaaaattgtagatggcagtgaacgccagcttcagttcccacggttttggtgagggtcaccacgtcgctcagcttcgtgacctcgcccgtttccttggcttctcgtgtcccgagtacacggggtactccgtggaccgtgttccccctcactgtgagctctctgtgtacctttacccccgtggaggtatacacggagctggccttcgcccacaccacttcactgtggccaggcccactctctagatcgcgtaccaggacctctcctggactgcgcttcgtcgcctggtccatgactacagccaccgtctcggaggctccgccttccggcagcttccacgccttccttctggccactcagacgccaggtacccttgtccgtacagcgagtctcagccagtgctgactcgtatggtcgagctttcggaggctcaggccactcagcacgacctactccttgaggcttaccgctcccttgcccgccgctacgccgctttggaggcccgtctggccgaggagggtgtcacctcagttgacactatctcttgggactcaggccgcctctgccacgccagccacctgtcctcccatagctcccgcggctctgcccgcactcccagtggcccgcgttcccccagctcgcgtgcgccgtactcaccagtgtactccccctacccacacccagttagcccttcctacacccccgggcacaccccagttgcttcctcccgccgtggcccacgctttatccgcaccgcgcggaagcgtgttgttggttcttccaccgtgttccgtttccactacccagctcccccaccgccagcggcccgtgctgctgccggccctcgacaggttccgccgatcccttcgcgccagccgatcgacgtttcttcgactgaggagccgactacaggaggcagccaggccgacgaggagtagaggaggcagtcttcagcagccgtccgtgtgataggcccttttgttccgccgccaactcttttggagtcgtgcgaggtagtgtgtgcgtgtgtttgttgtgggtgttgtttggtagtctggttctcctaggtggtgtgcgcacagtcaagctcggcatagctctgtgacttgtccacacccgttgtatcaggtgtatttatgatttgaaaaatccagtttatgcctagtgtgtgctatctgagttgctatttactttgctccttgccctcctaagtgcttatctgactcttacctcgcccttttctgggagtttagatggctagccgcccccgccgtgcagcccgtgcaccagcccgctttggttttgaagatggtagagttgagccagaagaaaatcatgagtcggctaatgagcagtctcaccgcagcaaccgttcgcatcgcacagcttcccgtaatgcagaaatggaacagtcccaccgctctcaccacactgtcagtcacaattctggagaagaacgcctcccttccccacctcatgtggaaaacaacatgcaacacttaatggcagttcagacacaaatcttgcaaggtttagccgcagccgtagccggttttcagcataatgcgcatggaaatgtccaccttcacatgagcaacaatagatccaagctgacagactttctgaggtctcgtccgccagagttctctcagaccgtcgagcccgtcgaggctgacgattggctgaaagatgtggatagaaaactcaacttagtgcagtgtactccggttgagaagacgctctacgcctctcaccagctaagaggacctgccgcagattggtgggagaattactgcaatgcacaccctgaacccactaacattgcttgggatgagtttgctacggccttccgtgcagctcatgtgccggaaagcactattgacatgaagaaagaagaattcaacagacttaagcaaggcaacagcagtgtcaatgagtacctaagtatgttcaacaagttggctcggtacgcccctgaggaagtggacacagacaagaagaagatcaggaagttcttgaagggaatcgcagttggaatgagactccagttgcttgctcatgacttccccacttttcaacatatgatcaacaaagcacttctacttgaggatgccagaaaagaggctaccgaagaatacaagaaacgcaagtctaaccatcagggaaattcttcccgaggcgcacctcgccctcgctacggtcaacccatgcaatatcaccagtcggtaactcaggctaaccgccagccaggctacgcccctcgtcctcagataaaccgtccggcacctcagccacagcagcgtgcccctagtggcaatactgcgccaaacagtgttacctctttcaagtcaccacagggaccgtcagcagttcagtgtttccggtgcaaccagatgggacactatgccagacagtgtcctcagaatcctaccaacaccaactcagggcatgctaatggcagccctgccagaactcctactccagcggcagctcagtctcgtcctagctctcaggcaagtggacaaggttctcgtgcgtccaacaactttggtcgaggacgtgtgaatcacattcaagctgaaaccgctcaggatgctccagacgttgtgatgggtatgttctctgtcaactccgtacccgcaatagttctatttgattcaggagcttcccattctttcatatcacaagcttttgtgaaaagaaatggttggaaaacccaaaatttacgtgtaccaatgatagtacattcccctggaaggaatataagggcaactcaaatatgcccggaagttaaccttagagttgaggaagttgacttcctagccaaaccgatagtcctagactcgcaaagcttggacatcatcctagggatggattggttggctaagcacaaaggacagatagattgtgccgaaaagtccatcactttgcaaggacctggaggaaagcaagtccgctttacccctaacacccctaccgcaagtcggtctatcctaacctgtttacaagtcacctccttggagtcagtgcccatagtctgtgaatatcctgacgtatttccggaagaattaacaagaatgccaccagaccgagagattgagttcgccatagaactggcaccaggcactgcaccaattgcaaaaagaccctaccgaatggcagctaatgagttagcagaggttaaaagacagatcgaagaactggaaagtaagggttatgtgcgacctagctcatccccttggggagccccagtgcttctggttaagaaaaaggatggctctgagagaatggtaatcgactatagagccctgaatgaagtaactataaagaacaagtacccgttgccacggattgacgatttattcgatcaacttaaaggagcaagagtcttctcaaaaattgacttgaggtcaggttaccaccaattgaaaatcagatctgaagatattccgaagaccgctttctcaacgcgttatggtctatacgagttcacagtaatgtccttcggactcaccaatgctccagcattcttcatgaacttaatgaacaaaatctttatggaatacctggatcagtttgtcgtggtgttcatcgatgacatcctgatatactccaagaatgaggaagaacatgctgaacacttaaggctgataatggaaaagctcagagatcatcagctattcgctaaattctcgaaatgcgagttctggttggaccgagtagcatttctcggacacgtgatctcctccaacggtgtcgaagtagatcccagcaaggttgaagctgtacttgcttggaaccctcccaagaatgtgtcagagattcgcagcttccttggcttagctggatattatcgaagattcattgaaggattctctaagctagccagacctatgaccgagctgttaaagaaggaaaagaaatttcaatggtctgtagcctgtgaagacagcttccaagaattgaagaaaaggttgaccactgccccagttctcaccttgccagatatcctaaaagatttcgagatcttctgtgacgcatcaagacaaggcttaggatgtgtcctaatgcaagaacaaaaggttgtggcctatgcatccaggcagctcaggcctcatgaagccaattatcccacccatgatctcgagttggcagccgtggttcatgctcttaagatctggaggcactatctaatcgggaacagatgtgaagtatacaccgatcacaaaagtcttaagtatatattcacacagaccgagttaaatatgagacagagaagatggttggaactaatcaaggattacaatcttggaatccactatcatcctggtaaagctaacgtggtcgctgatgcgctaagtcgcaaggcctatagcaatatagctcaaatacggcctgaccaagatcacctgtgcagagaattggagaagttaagactgaccgtggtacagtcaggtgtccctgccagcttgacagtacagcctaccctagagtcgcaaatccgggaggctcagaaagacgacgaagggataaaagagttaataaaaagaatacaggagaagaaagacactaatttctccatagacgatcaaggcacagtttggtgcggtccacgcatctgtgtaccggccaagaaggagttaagagatctcatcctaaaagaagctcatgagtccgcctactccattcatccaggaagtacgaagatgtaccaagatatcaaggcatacttctggtgggctggaatgaagcgagatgtcgcagaatatgtagccttgtgtgacatttgccaaagagtcaaggcagagcatcagaggccagctggtctgctgcaacccctaccgatccccgagtggaaatgggaagagatcggaatggatttcatcaccggtttgccaagaacccctagcgggtacgactccatctgggtaatcgtggatcgactcacgaaatcagctcatttcgtgccagtgaaaaccacctatgatggaaggaaactagcagaactctacatgacccatgtcgtatgtaggtttggttgtcccaagaaaatagtgtcggatcgaggcactcagttcacctcaaggttctggaagcagttgcatgaagctctcggaactgatctaaattttagtacagcctaccatccgcagaccgatggtcagacagaaagggtaaaccaaatcctagaagacatgctgcgtgcgtgtgccttggatttcgaaggcacttgggatcgttgtttgccgtatgctgagttctcatacaacaacagttatcaggccagcattcagatgtcgccgaatgaggcaatgttcggaagaaagtgccgcactcccttgtgctggaatgaggtgggcgaagcgctggtattcggtcctgacatactcaagtcagcagaagaacaagttaagctaatccgagaacgattaaagacagcgcagaaccgtcagaagaattacgctgacaatcggaggcgtgaccttgagttcgaaaaaggagatcatgtatacctgcgggtatcacccctccgtggtatgaagaggtttgggatgtccggcaagttagcaccccgctacatcggcccctacctcataaccgccagacatggcgaagtggcttatcagcttgagctacctgaaggtctcgcagatgtgcacaacgtgttccacgtatcccagttaaagaaatgtcttcgagttccagaagagcaagttcccctgggtaatatcgagctggaaaagaatctgacctacaaggaaagaccgatcaaggttcttgaagaggcagaacgtcagactcgaaggaagaccatcaagttctacaaagtccaatggagcaatcattccgaagacgaggcaacctgggagcgagaagatcttctccgcgccgagttcccggacctgctcccttaggtgctgaatctcggggtcgagattcttgttaggggggttggtctgtagcgcccgttccgtcgaggcgcctagcgggaaaattatctcttaaaaaccctaattgcgaaatttgtttctttgcttgttgtctagtgtccgtgccatctcaagatctcaatccccgatctatcgtcgagttcaattccgaatccaaatccttccaaaatcaattcctccgcaaaagtctattttgcctcccccgaggtcgatgggccgaatctcgctcggcccatcttcccctcttccccggcccatctctccctctccccccgggcgctctcccgctctctctctctctctctcttccccgcccgcacgctgctcgcgcgtgcgagagccgccccgagcgcctctctccccgctccccccctccgccccgcccgcacgccgcgcgcgcgtgcgcgggagtcgcccgcgccgagcgccccttccctcgcgcgagctccccgctcacaaagatgcttcccgcgcgccgtgttcgcgtgcgcgcgccctcgcggacgccgcccgttgtttcccgcgcgcgcgcgccgagtggccgaccgcccggtcgccgccgtcgtcagcgtctgccgcgcctgtcgccagtgtcgccgctccgctccaaaccgcccgccgtcatcgccgtcgtcaccgcccggcccccgccactccgcgcgcaagccgccaagggaaggaggctgcgcccctcctctctctgccgcgtcgcccccgctcccctccccctttttcccgaatcggcaaaggggcaagccccctttctccccctccttttcccctttttcctcctcgccggcgtcatcctccctgtcgccgctttggccgcgaccgccgagcgccagctcgcgcccttgaccgccctaagtcggttcccaaaccgacattgccatcctataaacccaagcctccccctttcccttcctctcacattcgcctcctcaccgttgccgccgcccccgtgctctgtctcgcctccgccgtccatcgccaagcgccgggagagccggtgcgttcgtggacgcggaaggggactctgggtgctcgtctccttcctcttccccggcccgaggccggagagattactcccgcgccgtcggcctctcgtcacagcgcccctcctcttctcggtgatgtctctctccgttcttcctcctcgctccatctcctccccctagctttcggtagtagcttgagtagcctccccatagttagccggcgccgccccgaccgttgccgtcgctcgccgtgtgttcgccgccgtcgccgctcgagctccgtagaacccgctcgtcgccggcctcgctcggcgtagttccgcccaatccgacgctagcgtcgagttcccgaagccgcatagatgctctcaccgccgggaatcgacctctcgtgacctcgtcgccgtttccctcttctcccgccgccggttgccgccgccgcaatccgccgccgtcgagcaacctccggcgaatccgagccgttggctcgcctccccttgtcacgtgcaaccgcccggtgtgctcgctgttgcccgtatcaccgtggttcgctccgccgctcgccgctgtcgtccgccgtccgttccggccggcgtcgtcgtctacctcccgccggcccgcgtggctgccacgtaggcgccacgtcggcgccacctcggccgcgaccggatcagccgacccggccagccgctccctccgtttttttcccccgcgcgcatggtccgcggtgagccgtgaggctgcgcgtgggcccgccgtatccgttcctccgcgaaccgcgcgcgtgcaccgcgtcccagccccgcccgcgcgcgtacgccgcaaactccctccgcacggtgagccgagccgctgacaagcgggtcccacccgggaccgcgcgcggtgagcccggtccaccggctctctctcccctcccctcccgcgcgcgcgcttgggccgttttgggccggccagcccgttaagctcggccgagccgctccatttaccttgggccgcgccctagccgcccgaggaaaagtctgatttccatccctcttttcttttcttttcttttcttttcttttccaaaaaggatttaattaaatccttttcctttagaccaaaaatccaataatcttagaaattcaatatcttcccaaccgtaaatccgtttgactccgttcaacttccaaaattcctcaaatctcgagatctatctaatggcacgcttagaggtcattaatagggctttattttcgccgtttgttgagttgttccgtttcgcgtgtagttccggagcccgaagacccgcagtgcgaggatttcgaggatcaagctccagatctcgagcaaggcaagccacctttgaacatcttgagcctatatttgaaatttaattatgttgcttgaaaaatattatgcattgataggatcgcacttaatcttttgtcccgtctgcaagacagattggcggacttacctaaattgttgcatttgatcctttccttgttaattgttacagcatgtccccttgtaaccacctagttgcgtcttgatattcgtgcatcctgtgcgagtatcgacggacgccttcaaacttataatctgaataacaacttgggtaaaacttgggttttacgaaagatttggaaaacccgacacctgggtcggtgcttgcgaactaaatgaatttccaaaaccgcggaccggggaacgtaccgggtgtacggtttcccgctctcgcacttaaggaccgattccttggaatttcatccaaacataagacaagtacgaccacatgggtggaatgggacacccctggctgagtaactagcttatcaggggagccttgatgccgagagacatgtggattcgccggggtggtgtcggggaggacccctgggcttcctggcacagtatggtctgggacctaacctgttgttggtctgggacccctctcgtcggcatatggtaaacctgtgtcggctttcgaaatgccttgtcatgaaagcttggaggtctcccgacgtggctgatccccacgggctgggtgacccgggttagtaatgtcgtgtgggtaaagtgtaccccctctgcaaaggttaacaaactgttcgaacagccgtgcccacggtcatgggcggatgtgaggtgattcctagcgtagttttgtttgactactgtttgtgaaattgctgttgtgaaaaggggttcgatgtttgaaaaatctgcagctgatgggatcagctaggcccgggtggctgtttgaaaagttgtaggcccgggtggccgtttgaaaagttgttggcccgggtggccgtttgaaaagctgttggccgggtgccaaccctgtttcaagatctaaagactgatacattgcacatactccgaccggacgagacgcactgtcttatccgtgtcgtttgagaagcactcacttagttgtttttagaaaagagtttaaataaaataaattgcgaaaacaacagcctttccttgaagcctgcattaaacacttaattcccatggcttgctgagtactcccgtactcacccttgctctatataaataccccccccagttgctgaagaagatgaagcagatcctgctgatgaggagttcttccaggagcaagccggctacgatgagttttagggtttcggcctagttcccaagtcgcgcctgtgtgtttggtccaagtcatggtttccgtttcccttttgtaatgcagttgtgagctcgggatctgtccgcagcccaacatgactgtacctctactctataataaagagacctctgttgctgtgatattatgtctccctgtgataccagcactgtttcctgggactggtatcgattaacatgttaaattggagcgtcacgggctagttccggtcgggactagttcggggcgtgacatcgtccttctctctgtcaggtcagaacgtgccctgagaagaggcttccactgcatccgttagtcgacgcgcagcctcgcgtatctgatcgctgaagaccagggagacatcaactgggttgagcgttccaccgtgagcatagtaccagaacttcgatcgatccagccatttagcggtggccggttcgataccccactcaagcaagcttgcctccatctcgtcccacttcggcatcgcgacgctatagccgcctgaccccaagtggtgatggtacttcttcttggcggcattttctttgtttctttccatcatcgcctgcccttgttgacctgtcttatatgcaacgaactcgtcccagtgatcccttagctttgggaatgtgtcgaagttcggtgtctgccccttcaggatatatttctggtacagatctcccttgaagctctaaaatggttctgccattttctttagagtccaccttttcactttgtcctctgtacctgcgggaagggtgaatgtctcgagcattgtggtccacagcatctctttctccgaatctgggacaaagctctcatgatctccgcgtgcccttgttctgcgccagtacaccgtactgacaggcatgttatcccgcacaacccaaccgctgtgtcgtacgtagttcttgactgcttccgccggggcactaggtcggccgtcttcgtccacttccgttatgaggtgccgaccctcaagcttctttgcggcacctcgttgcccgcgtgccctcttctgtccagcggagggttgacttccactagcctcctcctcctggttcccctccacatccctctccacgtgcccctcctggttcccctccgcatccctctccacgttcccttcctcgttcaagtactggtttggatcctcgttcccctcttcttcgttccagtactggctgcttccctccgcgattgtatcatacaatatctgttcctcatcgcgatcagccatctgttcatacaagaaatagttgctaagtctataagtcatttttgctttaacaatcttatatgctaaaaatcatatatgctaagtctaactgtcgtatatgctaagtctaattacaaatctaataatcttatattaaaactataataatcttatactaaaactcaaataatattgtattaaaactgtaatagtcaactatgttaagtctaagtgacgtatattaggaccctagtcaataattatatactaagtctaattacaaatctaataatcttatattaaaactcaaataatcttatactaaaactcaaatagtcatatatgctaagtctaactgtcgtatattagaaccctacacaatcttatatgctaagtctaattacaaatctaataatcttatattaaaactataataatcttatgttaaaactcaaatagtcatatatgctaagtctaactgtcgtatattagaaccctacacaatcttatatgctaagtctaattacaaatctaataatcttatattaaaactcaaataatcttatactaaaactcaaatagtcatatatgctaagtctaactgtcgtatattagaaccctacacaatcttatatgctaagtctaattacaaatctaataatcttatattaaaactataataatattgtattaaaactctaattataatgctaagtctaagtgtcgtatattaaatctaatagtcttaattgcattaaaaatctaacaatcatatatttacatcacttgcctgcgcgaattccttcgagggctagctaccactccggcttgagggacgacgacgacaacgtcttttctgcaacatacaaaaagatgtattaggataaacgcaaagtaacatatattgtatttcacgttcgcgttctcgttaagttcacatttcattcacgatcgttcacgttcgcgttctcgttaagttcacgtttcattcacctacgttcattcgttcacgtgcgttcacgttaacgtacgttaagtaatgttcacgtttcattcacctacgttcgttcgttcacgttcgttcattcgttcacgttctcgttcacgtacgtttcgttcgttcacgttctcgttcacgttcgttcgttcacgttcacgttcttgttcacgttcgttcgtttgttcacgttctcgttcatgttcgttcgttcgttctcgttcacgatcgttcgttcgttcatgtggcagcagcggagcggcggcgtggcggcgcggcatcggcgtggcgcggcggcggcgttgcgtggcggcggcgtggcggagcggcggtgccgtgtcgcggcggcgtcgtggcgtcccggcgtgtcgtgccgccgcggcttcgtcggcactgccagtgcgatgtcgtcgccggtgccggccgcatcgaggtcggggtcggcatcgtcggcgcagcggagtcgtgttcggccacgacgacgtcggcggcggcgtcggcaacaaggcggccggcggcggtttggggagagagagagagagagagagggaggcggcggcggctctcaccccagagatgcggcggcggtggaggcggcggaggcggcgacgacgatgagcgcgagacgacggcgagatacgacggcggcgtcggcgcggggatgccctaggcagtggcggcgaaggagaagccgagagagatcgatcggcgaaaaaacttctaagtgttggtggagaagacgagggcgcgcatcgggaatatatatacccctagatctttagtcccggttgttctgaacaactaggagtaaagatatctttactcccggctgttctcatcaaccgggactaaagatattttcccgctatttccaaattctttttaaacccggttagggttaagaaccaggactactgataagcgtactgaatattaatttccattacatatgtgtttctaaaatggactaaagatattttcccgctatttccaaattctttttaaacccggttagggttaagaaccaggactactgataagcgtactgaatattaatttccattacatatgtgtttctaaaatagaaaataatgcatttaaattatttaaagtcgtaaaattaatgacaattacttcgaaaaattattgttgtctgtagtaaattaagtggataaaacgtaataagcaaatatatgatttaaaattaataaaaattctaataatcatatatacttagcatatgaatgatattaaattattaaaaattgtaattaacatatgtatatacatacgacatgcatgatttaaaattaataaaaattctaataatcttatataattagcatatgaatgatattaaattaattgttaaaaactctaattaacatatgtaaatacatacgacatgcatgatttaaaattaatagaaattcgaataatcatatataattagcatatgaatgatattaaattaattgttaaaaactctaattaacatatgtaaatgccacatgcatgatttaaaacttttaaaaatcctaattatcgcatataaatagcatatgcatgatttaaaattgttaaaaactctaagtaacatatgtaaatgccacatgcatgacttaaaacttttcaaaattctaattatcacatataactagcatatacatgatttaaaattgttcaaaactctaagtattatatgtaaatgccacatgcatgatttaaaacttttaaaaattctaattatcgcatataactagcaattacatgatttaaaattgttaaaacctctaataatcgtacgtaattaacatatgccatacaacaattgatttatatggataatcaatacatccaaaatagcttaaatcatgtacacaataattacggcaatacatcggcggtgacggttgaccgcacgtactttctcctcactattgttcccttcttgtgatcgctacgtgagtaaggggtgtcttcatttgataggaggatgctagggtcaatcatcaccgtgaaagggggttgcccatcaaactgatcataatcctcgtcagtcttgtcctcaactccgacgattttcttttgcctgagagaaccacatgacgctttggctcgtcaggccctctgcccttctttcctttgctagacatgtccttcacgtaaaagacttgcgttacatcattgacaaggacaaaaggttcgtccgagtatccaacctttttaaggtcaactgttgtcatcccactgtcatcaatcattacgcctccaccagtcaacctaacccattggcaccggaacagagggaccttgagaggaccatagtcaagttcccatatgtcctcgatggcaccgtaatacgtgccagttgttccatcgtgtcccatggcatcgatacgaacagcgctgttttggttcgtgctcttcatgtcttgggctctcgtgtagaatgtgtaaccattgatctcatatccctagaatgtcgcgatcgacccagatggtcccctcgccaggaaggccagatgttggttgatcgtctcgttacccatgagatgttgtcgtagccacgcgcggaaagtatcaatgtgatgccgtgtaatccatgcatcggacataccgatgtttctggcgagaactagagccaagtgctcctcgatgtaaggagctaccaatgaagattgttgcagaaccgtgaaatgggttttacggaataaattgttgtctaccgtcattattgctttccttccgagagttccctttccccgtagtctcccttcatggcgtcattcaggtacctcgattgggcaaaggtcttcaataaattctacgcaaaattcgatgacctcctctgttccataccccttggcgatgcttgcctctggacgagcacggttacgaacatacttcttaagaacgcccatgtacctctcaaaaggaaaagtgttgtgtaggtacacaggtccaagaatactgatctctttgacaaggtgacaaagcagatgcgtcattatattgaaaaatgaaggtggaaatatcaactcaaaactgacaagacattgcaccacatcattttgaagggcttctaatctatccggatcgatgaccttctgcaaaattgcgttcatgaatgcacatagctttgttattgttgcccggacattgtctaaaaggataccccttattacaactggtagcagttgtgtcatcaacacgtgacagtcatgagactttaggtttgtgaacttcttctccttcgtgcttattattcgcttgatattcgtggagtatctagacggtacctttatgctctcgaagcattcaaatatactttccttctctgccttgctaagagtgtagctggctggactcaagtaatggcttcctttctcctttggttccgggtgaaggtcgtcgcgttgttccatatgcttcagatcattacgtgcttctagtgtatctttcgactttccatatatacctaggaagccaagaaggtttacgcaaaggttcttagtgaggtgcatcacgtcgattgcgtggcggacgtccaagaattcccaatagggtaactctcaaaatatagagttctttttccacatcgccgcgtgaccatctttgctctctataggctggcttccaggcccctttccgaacactactttaagatctttaaccatagcaaacactgttttcccgctgcgatgtttaggcttcgtacggtggtctgccttatgttcaaagtgcttgcctttcttccgtaccgggtggtttgctgcaaggaatcgacgatgacccatgtacacaaccttcctacagtgcttaagatacgtactttctgtttcatccatacagtgagtccaagccttgtaccccttgttggactgtccggataggttgctaagtgcaggccaatcgttgatggttacgaacagcagcgctcgtaggttaaactcctcctgtttgtcctcgtcccacacggggacatcttccttcttccacaacagtttaagatcttcgaccagtggtcttaggtacacatcgacgtcgttactaggttgcttggggccttgaataataatcggcatcattatgtacttcctcttcatgcatagccagggggaggttgtagatacacatcgtaacgggccaagtgctatggccgctgctcatctctccaaaaggatttatgccatccgtactcaaaccaaaccgtatgtttcgtgcgtcctttccaaagtctttaaattctgcgaaccatcggcggggtgtctcagcatcccgtcctattgacgctcttcagcgtgccatcgcatcattctagcattccccttgttcctgaacaaacgccctagccgtggtattatagggaaataccacatcaccttagcaagaattctcttctttgttagctgcccgtcaacttctcctggatcgtctcgtctaatcttgtatcgtagtgctttgcaaacaggccatgcttctaggttctcgtactcctcaccgcgatataggatacaatcattcggacatgcgtgaatcttctgaacttccagtcctagagggcagactatcttcttagactcgtacattgtctcgggcaatttgtttccctccggaagaatgttcttgacgagtttcaataaatcgccaaatgccttgtcactaacaccattttttgccttccattgcaagaactccagagtggtatccaactttttgtgcccctgctcgcaacctgagtacaacgacgttctgtggtcctctaacatcttgtccaattgatgggcccctttttcactttcgcagtcctccttggcgtcctgcaacatctgaccaagatcatccgcaacgtcgttaccatcagcatccctttcctcctcgcccgtttgatttccttcaaatccaacgtactgagcaaagtccggaatattgtcatcttccacttcatcttcttccatttcaacactttgctctccgtgggatgtccaacaattatagcttggcatgaaccccgactcaaacaagtggaaatgaatagtcctggatacagaatactccctctaattcttacacttattgcatggataacaaataaaacccttatgcctgttagcttcggccactctcaaaaaataatgcacgccgtcaataaactctttggaccgccggtcagcgtacatccattgccgatccatctacatgacatgaaaaaaaatcgtacacaaataattattcttacaataatgatagtcatacaataattataaaataattacaaactctttcaatagtcatacaataatgacatatcattattcatacaaaaattataaaatattacaccaaataattcttatttactatttctaaagttttaaactaatattaatgtgttgtacttcttttaattttcattttagtttgttttctattatttaagattaactttcactatattttccttctcaactattttataaaaccttctttagcaaataaactaaatttctatatattctttcttccccacacaaattttctctctcatcaacttacaactaaatttcggagacaaaaaagtgtgcaaaacatagctccaaatgtaatatgacaaaaaaaacattggaggatgaagttgctaaccttttaggcacctccgatttgtatataatcaccaaaataaattcattagaaattttggtatgacctcctctcttttttgaagaaattttaaagtttgctcgggcagctggagaaggaagaagacatatacatatatatatatatatatatgtacatatatatgtatatatatgtacatatatatgtatatatatgtacatatatatgtatatatatgtacatatatatgtatatatatgtacatatatatatgtatatatacgtacatatatatatgtatatgtacgtacatatatgtatgtatatgtacgtatatatatgtgtatatgtacgtatatatatatgtatatgtacatatatatatacatatatatatatatacatacatatatatatatatacatatatatatataggggtgggactttagtcccggttggtgttatgaaccggggctaaagatctccgggatctttagtagttacgataccaaccgggactaaagatcccagggaggcctgacatgccctgacagcatttgaaccaggactatctttagtcccggttggtttaccaaccgggactaaagatcaaatatgcccgttaccctttttaaccgggactaaagatcatctttagccctgatttttattgcaaccgggactattgtgtaatttggccgaccgacgaaagatggtttctccaccagtgtgtggtacttacaatgtgccatgtatgttatcccaatatcaaatctgcattaatttgtctagttgtaatttgagttttagatattttaagtgagattatatctctacttattttccttacagatggttgtcactataaatatcaagggcaaatattatttatttccgtcttaaaatatccagtatttccgtgcgtggaccgtgtgtatctgtgctggctttgagcatggaccgtgtttatgtgctatagctttgctgtggaaagtgtccatcgctgatactctggtctgggctctggctggcagtgggcaaggagcgtcacgtgtgctgcagtgttcataatttttcataccaggcacgtcgcgttcgctaattggctgccatttgcgaccaggatttaaagggctacagaaatgcaatatcttcttcttttatttttttaaagaaaaaactggaatctagtggcgctgaatgagaggcttggagctagaggtggatgcaaggattcacgtttccaaaaaaaaaaagaaaaagtaaaatttcaaggtttcgacgtgagacgaaagcggattttcatgagaattttttaatgtttctaaagaattcaaatttaaaattgtaaattggagcaaaatttatctagaatttgttataatattttcatacgaggtatagatcctgcggtctatgatcggaaaggtaaaccttggacgcttccatcacatcattccattccatactcgcttctactgccaactttcgtgtgaacgcggtcccggactcccggtgcacacggccgctagctacgaccctacgacccacgatgtcatcacagtgtggtatgtacgcatcggcgatgtctgcacgctgatcggccggtcgaccagcgacagcgagctcacagcgtttggtttcggggttttttatatactggcggcacgcacgctgcagctgcagaccgggatctggacgaaagcaacaaagtagtggtaacggggtaggtttgttttacctcgacgcgcgcgagatgcacgcttcttggatgtaagcgtattttaatctggaccgggatttacgcaggaaggtggtgcaaacgcaagtgatctccttcggtaataacagatgatgatacggtcaccgtggcctttttctagctgcggatgtgatgcgctcatgcgctgaatcgcagtattgcgcacgacgccacgacaagggttgctgatgatccccgcaggtggtcgtcggatccagagctgctgctcattttcagcgcaggcgtgtgcatgcttccagcgctggatggcggcgctgatgaccgataattgagggggttaggactagtcggcataggatggcggcgctgactctctcgaactgtagtgaagaatacggcaaagcattttacagtggctagcagagctggagtgctggaggatgaggccggcatggattaataatcccttcgtccggagatttcctttttctttttttcgttttcgtgcacattgaatcatttgatcatttcctttggttgctgtggaagtggtgtggaaatgggatggtgaataagcccgattcgacaatcgacacgcaaatgatcctctcgcacattcctgcttatcagtctactctcgcagaatcctgctatcagcctgcatacatcatatatggagaccaggaagggaataagcagggaaggcaaacatgcaggttacgcgttgtcaataaatttcggtatgtatatcagctttcagatagataaatggagtggcaagattgatctctcttgatgatcatgtgttacttaattagcaaagtttaagctgctcaatactgcaatatgcacgctttgcacacagcatacataaggattctggaggcgcagtacgtaatagatcgttatatatggagtactcttatatatgcctagttgcctacagacattctgaacccagctgcagaaaagctaagctttcttttcttcatgggtcgcgggagatgcatcatcagccgttttcaagaactgctttgcaaacagtaatccgctgcagaatctggatgttgaatcggttacgctgaatttactagagtcgcaccgcacgaatgctcaacaagaaaaacacagccaccttttccatctgtagatctacatcaacaacaaagccaaattgaagagaaggaaaagccacagaacagacaaaaaaaaaagatggcacttcaaagttactatgtatgcaggaatttgtcgtcataaaggttgaagctaagccttacctttgttttgttttattttcgtgtattcctccgcatgaggtttgaagtctaagtacttggatatgttttggcggtgaatatagaaacgggatggataaaaaatccattatctaaaaatacaaactaaaagttaatcgaggattatccaaagttcctatgcgtgcagactaaaagtgaatcaaagactatcgaaagctacttttgtgcaggctaagagtgaatcaagtattatcgactcctactcttagaggagttatattgactattacatgtagaagatgagtttgtattcaggagtagagaagtatgattagaaatatctctattaagagcaaatatcgtggaaagcgaaaatttttattcccactccgtcgacattaatactctgcaggttacaaatgcatgatgaagatatcaagttaataaatgatgaatgtcgtaaacttgagacgacaattatgcctctatttgccaacttcgggtggaagttttctaatagaattcagtagttaggagatctttttcttctgttggtgtctattagtttgtgtttgcttagctttgtttctgctatcattaactttctgtgtgagttatgtaataattgattgtagctctttgagtaaatgccagaatgttacattccattatctaaaaaaaagcttatagagaagggaaagaaacaatcagcatcctttctaaaaagagaaatccaggccagacatgttggaatgacacttcacaatttacaagccggaaagtacttgagtaacacaaaatcacaaatcatgccgaatctaattcgtatccataccggatatcttgacccatcatttattaaaaccactgcaatttgactcccacaatggttttggaggacagtttcactaacgtgacgtctatgtgatggtgttaacctggtctttgtcccacgtgacgttgatgtggcgcttatgtgagattagaattgaaaaaaaaatatatgagactcatttatcattgacaacaaaaattgtgaaacccaccgacatgtgggcccacatgttatcccctctctcccttctctcttccccttcgcctgcccatcacaaccggagagagaggggatgacatgtgggctccatatgtcggtgggtgccacaatttttctgaatgacaaatgagtcctcaatataccttttttttaattctaatgtcacataagcgtcgcgttagagttaggatgaagatcaggtcaaccctgtcacatcaatgaaaccaacctccaaaatcatagaggagtcaaattgtatcggtttttattaggggtggcaattccccccgcggtgccggtcccctgcggggacccgccctcgggtgacatttttgcctcacgggtgcgccggggccagggccccgcatttgtgcgggtgaggggccggggggacattccacccacaggtgacccgcggggccccggggggtatatgacctcttaaaacatagcctattagaggcccaaacagtccatctcagtccaagtcatatataaccagcattcctaaccctaggtccctagccaactcctcccagaagccagcgccgcacgcccgcacctgcggatctcgccgtcccctgtcccctcccctccggttgccctctccaccgtcccctcccctcctttccggcggcgtggcggcgacgcgaatgcacggcgacggcatagcacacagaagttgaaggctgatactctaaacggtatttcttgattccctaattagaacaaaatttctgatctgagcttgtgtgtcacatgtgtgaagtatgtacaatatttttccttgctaaattaacgatcgtcttgtacgttctgtgctgatttgatgaagttgctactcacagcgggccccggtcaggttgcggggccccgggtgcgggggctgatttgcacccgcatgtccactcggggccgggtgcaggtgtaagggtcggggctcaggggtggggccgttccagcctaacctgtctccgccccgccctattgccatccctagtttttatagctgaggggtcatgatatccgctattgcgacaactgtacggaatagatttggccactagttaagggagtcacagtgaacttattcccctacgcgggctttcagaacgatcgagacgccatgtgcgtctcagacggtcccgcttcggcctgttcgccgaggcggcctcgctctcagacggcctagcgcgcatgtcccaggcgccgaggcccgaagcgctgccgcgaaccaaccgcgggtccgtggctactaaactaggcccagtctccgtctattcagagcaccggcccaagccgcggtggacagggtggtgctcgcgcgcgccgtcacgcgcggcggggcgttgcacgatgagcgaatcgttttaccgtttcgatgaacctttcgtgcgcgcgcaacaacgcgacactcatctccgcgggatcccctgcttcgccacgacgccacatcccgttccccgaagaaactgctcttccgtgaggctacaaaacatcgcggcgggcgagcgtgtcagctgactcgatgacactcggcaaacgcacactatgccattctaccatcactacagagcccctgtgtgtgtgcttgctggggtgttgtcgtcgcctagcgggcggcgttaatgatggagcaggggttgcgaaaggcccagttacgtgtaatccacgtaatggcactatgacgagctgtccaactgcgagctgcttcccggcactgtttgcacgctcgcacatggcacagctgtaggattagtggcaaccagctgcacactcacactcacactcacccgttgatcctatcctatctcgagaaaacgtccccggctaagttgttaagcatggaccatcacggtcgtcatattaagcatcgcgtcaatgtattcatcaccagttgttccagaggaaatgacgaccagtacgcatataggcagaagcttctaatgccggatgcttaacaatgacatgctagctgctgaccatgtgccatgtggtcttcagctaaacgggtatatatgggatatactcgtgtagacgtatacgtacgctcgcttgtattctttgggcgaaaggaacgtgacatgcacggggcggcgtgaacaaatggtgcgggtaggcagttttgtcgattgtcagtgattcatcagggagcttcacatgatgcctttccgatgatttaaccgggggattaagctgctctgggaaagccttgcgcgcgaatgtggggttgatagtctccacatgctgttgctctagctgccctttgattcgtgtgcccagcccgaatccgatttctgaaatcttatcatcttatccctgctctgcaaggtaaggtcaggaataatgggcaattgggcatctccatgggaaaaggtggaagaagagcagatcatgctgggcagtgtcacggtaaataaatggtggcaacatagatattactagtactaccagtacataattaacgtgccaagaacgagagggaggaaccaggaccggagtagcatacataatttatgcccctttacatttagcagccatagtagttcctaatatttagtttttacctttgttttttctcctttgtgtattttgtaaccaaaacttcttttcttttaatatattaacgtgtaaattttttacgtgtttgtgaaaaaaataattaacgtgtatctggcattgacaggtactaccacttggaggttaaatcgctggaggcgaaacggaaactaacaagattagcgtgctgcgttgttgcgtccacgaaacctgctaccacagcagcctgagtcgtctatcgtgccaacagatttcggcgattggtaaccactaaccacccatatgcgacatggggccatgtcgtgtgatcgcttcttttcagaaaccctgctagggcgtgggctcagatgatccatcgaacctgactaaaaaccctattgaaagttgaacgatctgaactgtagctacccactaactcatgcagccttttgttactccttgccacacccgtgaaaccgagcgatgcttgtctctcgcttctctcattgaccacgcagcagtgcacctacacgtgaccctgggcgcgtaatttttcacacccccacttgcagaaacagacgaggcggtttcacaggttctcttaccccatactcacatctacgatgtctaaatactcccactaatacccacacccatcgcgggtataaaattatccccatacccacacccgtgcggataacgggtatccaacggatacccatacacatataattgatttgtagtatttatagttttgtactataattagccatattagagttgtaaaccatcaatattttctctagcaacaatgctattaatattagtgttaaaaggcgagtaaaaaaattatacaaccacattacataattaagaaatcaaataataatttcatatagctagactaagcaatactttaagatgtgaaaggagttttatgctataatttagtagtcgtcgagagttatattgctcatagttttaggctcaatgaacgggttttttctacccacgggttggtgggtacgggtgggtaaagaacatacccatatccacgtatctaatggttaagagttttcgcccgttaatagacccatagatataagaattagaacacaattagtttctaatagagtaaaaactcgtcgggtcttgagttatgggtacccattgccatctcttggtgcaaccggagcaaaggtcgaagcggccaatggcgaggcgagggcgcgagaccccgcgaggcgtcgccgctgtagcagtttgacgctggccgcagccgcctgcgtgcgcgtgcttgtgtctaggcgtttttggggacggcgcacatgagggacggggacccgtgtgtcgcactgtctcgtcgagtcattggtcgaatcatgtgtatgcatgtcctctttgcggccgttttatattgggttcttcccttccggtcttggcggcgggtcggataattaactccgtatacttgatttagctttgggccatgtcgttcaactgttcgaagtgtatgccggtatgccgctgactgagcacctgcatctccatgtgatcgatcggtggttggcagagctcggcatggcccgtgggcggccgagacgatcggagatacgtgttgccttttgcgttgttactgctatacgcgtaccccatccacatccagccggagaccgggaacaaaggcgtttttacaaggcttcagctacgtcgaaattagaagggctgatatctacttgaatttgaatttgaattggtttggtttgtttcggtgaccagcgtccacggctcaaagcgctctcttgcctggcacggtggcgcatgctgcacgggagcaatagcaggaagcagcaggacaaacggtcaggaaaagcagaacgccgcgattgctgtacagctggtgcatggctggaaatgttgtactacaacgcgccataccggcaggtgaaaaagcgaatcggacggagtaaatacgtgcccgattaatccggaggtcaggacaacgcagcttgctggctcaaccgctcacgcacgtcaccttcggagtaacccaagttatggcgcgttccacgtaaaacatccaaaaacctccgcccctttttcccggcttccccccaaactggcaaacgcgtcacatgagttttacctaccaatgtttgcattattgggtgtacattgtgcaataccgaatttctgacgagttgaaacaggacaaggcaacgggaaaccccaagtagctaggtccatgcctcttcccccatcaccagcaaagcttagctgttggttacccaccttctccgttccccattgcctggttaagctgataaacctctctggctctcaatctcatcctttcgtctattccttgcagtcttgctctgattagcagtgtgggttttttcgcacaggagggccctacgcagcactagcacaaaaccaactcagcatgtgcagtgcaacctagcgaaagtggctgcacacatcagattggagtaggatatatggaggagagtatctatctgtgcgggaggctcctaccaatagtggtaccgcgtatataacacgacagcgtgggttcttgggcagcgcgacgccagggagcgcgtagggagagaaaagttcggttcttgagaaagaaaggggaatataagtgaggaggcgagagccagagatagagagagagagagagagagagatcggagcagctagctagagcatcaaaagcggccagccatggcgttggaggccaggttctttttggcggccgtgttcgccgtcgccgcgacgtgcttgtgcttatcggcggtggcctctgctttcgccgtgccgagcgtcgccttcgacgaagggtactcgccgctgttcggcgacgacaacctcgtccgctcgtcggatgataagagcgtccgcctcttgctcgaccggcgctccggtgcgttaatccccatcatcttgcaaagctcatctctctctccttctcgactggatttcgcctgcatcccctgctcatgtgcaccattagtatgagtcttcgtgttctgttcgtcatgttcttacggtacttgctgtctgcgtctatctgcaggttctgggttcatctcctcggattactacctccacggcttcttcagcgcgtccatcaagttgcccaaggcttacacggccggcgtcgtcgttgccttctacgtgagtgcctgcctctctcaccactgctccgatctgagaacattccttacactcctacccacaaaatccgcgttgtttaggttatcttcctgcggtttgttttgagccgttgctgctgttgcctcctcacatggcgtgtcaacccggaattcagctagtactacagtagtagtacaaaccatagcaagttgcgtaccagccccatgccctggtggcgcagggtagacagcagggcgagccacatgggctgtttggactttcaagcccaaaaaggctgcgccgcctgcacccgagaataaatgtacccctctcatgtcacgcgcactcaacagtcagtcaccagttcaaccaccattgatcacccctcaccaaaacgtacttatactgaattagtcgagcacgacgcgtacaacaacaggagtactcctaccagttagtctccgtgaatgcacgggtcacttaatacaacgccgtggtagatggaatattcaacggttccgtagttttttcttgcgttgcaatgcaggtgtttgttccaactaacacattatggctttcgatcgatcctaacggttttgttcgtgtacgtcgtcatttgcagctgtcaaacggggacgtgtacgagaagacgcacgacgagctggacttcgagttcctgggcagccgttggggcggccagtggcgtgtgcagaccaacgcctacggcaacggcagcaccgcgcgcggccgcgaggagcgctacctcctccccttcgaccccaccctcgaggcccatcgctactccgtcctctgggcccccacccacatcatgtacgcgatctctctgcactattcaatctctgcaaactgagctgaaccgagctttgggcttacggaatggatgtgcatgcagattctacatcgatgacacaccgatcagggaggtgatcaggcacccgggcatgggcggggatttcccgtcgaagccgatggcggtatacgcgacgatctgggacggttcgacctgggccacggacggcggcaagtacaaggtgaactacaagtacgcgccgttcgcctccgagttctccgacctggcgctgctcggctgccgcgccgacccggtgctccgcgccccgcgcgacggcggcggcgccgggtgcgccgagcccgacctgctcggcctcctcacggccgactacgccgtcatgaccccgcggaagcgcgccgcgatgcgcgcgttccgcgcgcggcacatgacctacaccgtgtgctacgacgcggtgcggtacgcggccgggccgttcccggagtgcgacgtctctgacgtggagaaggagtccttctcggcgtggggcgagtccaagaacgtcgtcatgaaggcgcgtggccgcgggcgccgccgaggacgcaaggccggcgccggagccatgtcgcgcctcgacgtgtccagcagctgaagtgtcaacttgggaagctaatggcatatgatggttactattacactactagattctattaattttgcggtattgattgattaattgtagtatggttttccatgtatgtatagtttgtaaaggtagtaggtgctagggattaagttcggtaccaatttcgactattattctttgattcgttggatggcagccaataatatgatatcaccggattatattactcagaagattttgttcggcgtaacccataaacgcatatcgtcgccactcgtccgtagtaggccataaggtattgatagcgtgtcgagaagcataatcacgtacgagattcggtgttaaaagtgacgggacaaggaacggaccggacgccgtggacaactggagatgcttgcattttcgtcgcctgtcacgcggagtacagtaacacctgtgtgtatccgaggcaaataccacccgggaaaggtggcccggcccatgatcgaaaaaccactacaggacggataggattcggaggcatttaagaatgcctcaacttgcactaaaaaaagtgttggatatactgctgtagggaaaaggattttaaggcactttttcaaaatgccttcataagtatagatgaaggcactttttaaattgcctttacatttgaggcactttttagattgcctttatacacatttaaggcatttggacttgtgccaatagttttttccaaggtattttaacatatgcccctaatttattttcaaggcatttttgacaatgcctttacttttctttttaggcactttattaaaatgcctcaaatagtacaatacatgcatatacaggctcatcccaccatatgaatgttttaacaggaaataacataacacatcacatatatctccaaaaacaatatagaacaataattcccaattccaattcaatcgcacattaagtggttcacaaatcatctcaatggtaattaagtttgtaagatatgctatcacaatcaatggtatgtttatgatttacaagacaataaacatcattgatctactgagtggcttgctcctgtcatcctgtgaggctcgcatgtatttgcaatgaggaaaaacaacctgagaatggattacaccaaaacctgtccatgcatttggacctgcaaaagaaaaacatgtaagtttctatatcaattttcaatatatatatatatagacacacacacacgcacgcgcgcgcgcgcacacacgcgcgcgctgcaatatatacatgttgcattcaggtgcctatcgtatccatgctacaaagtcatgttagacatcatcttgcacatggcgattagagggcaaagtggcaaatcacaacatgagaagaggtaaaccaacatcttttcatccaaccttgcagggcaaagtatgggaattaatcccggccataacataacatccattgccatcaaaatataagaaccggtttcatagtaattcataacataccatgcatatttcctattattacacaaacaagattgagctcatgaactatagttctttaagaataaacagatgcagctgcaacacctacaaagcatatcactaggattaatattcatttgctagaattcctttactcattaatcacctaaatataatgcattgtccacatattattgcaaaaagaattaagagatggagagagggagtgaggggcaatttacttgagctagaaccgggaagttgttaacagttggctattggtgaagttagcatatggagaatcgggtctggccttcccaatcttctttgccctagaatgtgtatcttcacgtcctatattcttctttggtgttagatcatgcacctctctcttgtgtccaacaacactttgcagtgcattatcaatgctattgtgcttgaacacctcagttagtgccaccgaatttccttggttagctgagttatgtctcgcaatagtcgacaccttaaattgagtgaaaatcatatttaacatccagattaccacatatagcaatatcactctaattttgacttaaatgtactagtaacaattagtgaaatatgcagtaccttagagtgtagagcttgaccacttggatgcattagctgcaatgtaattttaaaaaattagttgcatgtaaataagctagacaaatgaaataatagcatcatacattgtcacgtggccatgggatgcatcgagcttgagcacttcctaacttgctgatcattccatatgcacgaggtattatggtgtgctgattgaatacaatgttaacaaggatgtcaacacaatcatttagtgcctggccatcaacagaaatagcgtttttgtcggtcttctgaatggtacctagagcaaccatttttccactttttggagatattaggccaactttcataccacttttcaagatagcttttgtatctaatccagcctaaaagaagagatatagcttgtgagtctttctccttttagctagttcactagtaaaatgcaaaaaaagcatacctccagcccttcatggagtggtgtatgaaactgtctttttctgttttgtagattgggttcagatgaagttggtttctttgatttctgttggacagcatatgaaggtggtatattctccttattcaaatctagccgaggggatctaaacttcttttttgttgaggaggtgatgtcacttgaccaaaaggctactcattcaggaaaataacatatcagtaacaattagttgtatcaaattttaactcaagcacatatatgagatgctaaactgttgcatacctctgactgtttatgcaattctagatgaggagatctaaacttctgtttttgctgaggaagtgatgtcactttactagacggctagtcattcagaaaaaaaaagattagcaacaactagttgaactaatttttaactcaccacatgtattaaatgctagattgttgcatacctgtgactgtagaagtgttttcttgtttctggatgaaagtgatggtgcttgattgatgcaattcataggatccagttccttgaattaaaaaaagatataagatttatcaggtgcaattggtaattgtcaaagctataaaggacgatgggatggtatagtaaataaaaaaggaactcacctccaactgatttttagctggtgaattagacacctgacttctattcataggtgcatgcccttgggaagctagcaacatactttttaattcctcatattgtttttccagcctttcattccgtgccatcatcaaggtctgatttgctgctaatgtgtccaccatatccaaagctccttgttctcctgtttagtttcttctagttgtgcgatagcttcagctaggtgccttgaagccactccacctgctagcaggcccatgccactgttctttctagttttcttccttggaaacatttctgaatatagatcatcatctcgtgcctcttcaccgatatgagcagggttttcctcgatccttcttttaatcctttgttgaaattaacaaccatacatggttatcaatcatgaaggatacttgtacaatcagcaagcacatatgtaatttttttaaagcaaaatagtacacttgtacaaatactagatgagaaatcaggaaaagagcatacaattttatcactacagtattcatccaagggttctccatttcttttggtatgagtaattacatagagttcagcccgtccaacttttctgttctctttaagctcctgcaatgatatgacaatgctatagaatttgcagttgcatagctaaaataatttgaaaggccatacaagcaataaaagtaccgtttgatcaagaacaactgcaaaacctcgtgaaccagtggtgtgagttccattgagttgcaaggatctagtagctttattcctctctgacttgatctataagcaagaaatataacacatataagattaaaaaatctaatcagatatgttgttctataatttatttcaaacatgtacttatttttggcaagtatactttacccgagctgcttcagtcttccaatacctcaccaaccatgcccattgttttatagggattctttcttggcagccattaagtacattttgtctccatgataactcagaattgaagtacattctcttcaagacagctttaaaatctttccactttttgctagctgatttcaaaatccaaggtttgtaatgatcctcaatgtcaaaaattccctgtaatatagtgttgttaccaccacattacatagttgtttataatgtaagtgcaagtgcaagattgttaaagctgaggcatacctgaacagatgtccaaactttcgtcttgcttgcttcaggtacctttctccaattctttgcagccaaggatacatatttgcctttgacaagagttccaataaaattggttaatttgcaagtctttaatccacaaggttgaccatatcgattgaatttcaatctgatcttctcattgggatcaaggtccttccatagcgatctcatcattgtggggcctcttccacttttctttgtactttctagcatttcttcaaaataaaatcagaactggaccttcatgttcaaaactaaaattcatgtccattacatgttaatatgctcaaaaactcaccatgaacttgaccttcatgctccaagtcagcataaggtggcaaattgtccccaggttcagtctcatcataatcttcagagctacagtaatcttcatagtcatctccctcatcggatcctccattgcttattatgtcatcttcagtttgaaagttgtgttcatatgtgtatccatttgcatcataaggcagattgcaactatgtgttgtagattaacaatgcagcataaaacaacttaggacagacattcagaagtgcacatattcagattaacctgcaaatgtgtcattttgtttggatgccaatggcattgcagcatgaaagtttcttgatttaaactatcattaaaaacagcaacaaagttcagttagcaatagaaatgagaaaacccaaggagaaagtacaagtgttgtgtgataacctttgttggttggtgatcaagttctctgaattggataaggcgaattctataaatttatcaaccccgatattatattcagcactagatctagatgttttcatccaatccttatccatggtaaattcaattaatattacctagtaacatagatgaaaatacagattgcaccattagtttataataatactaaaatatggggttaaatgaatcactgataaataatgcattaatgcctatgcaagcatctaaaccatctccacatccagctcaacaccaaacatctactaaacagttcagttccattcaccaactaataaaaatcttttggtaaatataagagaccaaaaaagtattttatgaacattatttcactaagcataaacaagctagcacaggacaaccttgtaaaacaccctaaaaacacccaaattgggtcagtgtgacaaatgagaatatagtactatgggtagatgtgtatcagtgcatttagacaatactagatttttttttaaataaatattctgattcatgcataaataactgttattcatggaaaatcatttttctgtgtcaacttgtttagattcagattatttgcatatagtgacgtgcttttggttgaaattcatcaagaacagtggttggtcaggctattgtagtatattggaagttggattgtttgatctacaggctgcactacacccttttgcatgggaatgatttcaatcagcataatacatagatctcaacaaccgcatgtaaccaaaatattcagtttgagtaatattcagattctccaaatataatacatcctataatcatttataatacgtcctataattttctacaaccatagatttatatacaggaatgatacttctgcaatatggtacttaggaagttccatgattcacaacagaacaactggtaactccaattttctaaattaactaatactaatgatatcgaatggtgatttcacactctagagcagactaggattaaaaaaaatatttaaaatctcaaactgcagggtaaaaaaacaataatagatcatatataaggagattctccagtaaaacattatgtattctagagctaataagtcaaaatagatcgattatctcatgaaaaatcaaagtatacatcacatattttagttcatatactcacagtataaaggcagcaacggtagatcccaaggtggctcggctcgaccaggatgaagaaagtggaggcgcgactccggatccagcagggagagacggcaccgggactggagatggtgccggcggagggagcagcaagcgcccccctccccccgacgactaccctagcttgtttgaggcgcaagtgatctgcaagttttgggcatggaacgggagcgaagcaggctggtgtgtgtagatctggggagtagagcggcggcagcagatggcggcggcggtggcggtggcggcggcggcgccgcccggagtcgcaagcggcgatggatgattttttttttctagcgttttttcttctctcacgcgatctgatcgagaggataaggtttcgtatgtggtggatgagcacgtgtggtggaaggactattttatctaagtgaaattcttttagggtttttttgcatatataacagttttggaggcatttctgttccaaatgccttcgtttgaccaggcaattttgcaaaacgcccagatagtatgaaatattacggcgtttcatcatagtgccggtgatagataatttttctaaggcgttactgaaaaatgccttagaagcactgagtttttgaggcattcataataaaagtgtcttcagatgacagacttttaaaggcataaactaaatttgccttgtaattaatattttttgaggcatttttatcaaaattgccataaaaggagatgatttgaggcagttttagataaatgccttcaacagaatgccttcaaatgcattccatcctgtagttttagataaatttagcgttagagcctaaattttatctggactcgaatgtagccgagccccgtttgcccacccacgccttcaacaagccagccggtccggcccaaaacatttataggccggatggcctttgcttagcccagcggctccagcgtaccatccaaatctccacttccaggcggaatttggctgccgcgacgaacagcgcgcgaaaccacggcaacggtagacaaggatcccacgagtcacggaatcgcactgttccttcgcaacgaatcgcgtcgctgattctcccggtcgacatgaacgtctctcgccggacgccgaccgcggcgtcaccttttcctttccctctcgtcccttcttttcccctacgcacttgaccatcctgttgccggacctgcctgtgcctgggccacagcctcagaccaaccaaccaaccagcgcctgcctgtacacgagcacaggacggcagcagcagcacgagaggtagcagctgaacaacagccacaccctatactacttctaggtcatcacccccagagtgctcgttgtcgcgaacttttgtgggtttagctcaaaagaacgtagtgcgaagacgacgacaacaagcgagaccggccaagacaactttttgcacggcgtgtctcaacctccccaaagtggaaaaaagcacaacgccacccactgttcacgaggggcctcgaggaacaatggattaggcttggggaaaggaaagaaaaaaaaacctgtcgaattattttaggcttccggtctcctctcctcgaagagaaacgaggagagttaggtatggttgtgaatctcccggtgcatgtagggcctgtttggttgggtatttcaacttaccacacctcaagttagcacatgtcaaaagtgtggcaaacttaatccttgccatagttttggctcaaaaatgtgtggcaaagcagcaagaagctacctaactttctttggcaggctaaactataaaagcaaaacaaacagggctaagtagttgtggctgactaagatgaggtgcggcattctgtggcatggatccaaacagccccgtagtacaaattccccacgccacagccttctgtagcgtagcgtagcgatcgcctctccattttctggtacagacttgagatttcttcttcgttttcttctagcttatttttttgtttgttcaagcgactcaggaattgtcgcacgttagacttgggatttggtcaatcatacgccacacgtgttcctatcaccccccgtgctagcttccactggaacgaaacgaagaactaatactaatcccctggagtgattgattagctggaaatcctcccatgacaatgagtgagctgaatcttcaggtgcaactagtcctactaagcttcgactgctactacgtgtcacgaccttaaaaaaacatgagttcacatttttgcatcgtccatttacatcggcgtcttcgctcgagcccttgagagcgatttttcttttgttatccaccctgcagtttttttttttttttttgctgatgagtcgctttaggtgtgtgtgaaggcaattattccccgaatcagtcagacacatctatcgtccaatcagcctacgagagctgtgatatcaattctcaagcagagacgtcaacgtcagagagagtctggatccatccatcgttttccgcacgcacgttttttaaactgctaaacggtgtgtttttttgcaaaaaaaaaatctatacgaaagttgctaaaaaaatcatattaatctattttaaaaaaaacaaatattaaattaatcacgtgctaatcgctgctccgttttccatgccagggagtgaggttcagcctaaccttgttcacttgcggcagcaattgggtagtgccaatttgactgatcgtttcactgttttcatatcttgattggttttactaaattttctgcatcttgaggtttacagaccatcgtgcgattgtttgttaggctatcaatacgatataaattgaactggatcagttttttttttctaaaaaaaggaattgaactgcactgaatatttatcctggagtacagttggaaaccggagatttcacaacaatcaccataggaacaattaataacaaaaattcggcactccaaagcttgaactcagcacaaattgatgtccctcgtgcaacgaacttgttggcctaacatctactgagtcagagggcttttagctaggttagttagatgatgggagactaaaagttttcagttctaaaattggtacctcagtcccatattatagctgacctcctgtccttcattttagtttaaaccgcatagcatgatagcaagatatccgtgggctatggccaagccagccacatccctgtcatacaacactctgcaaagatgagaggaataagcaaaggacagtgaaaaggatggtactcgcagagacgaccaagcaatactaatatctctcaactaacgatgccactgttagggttctagccttctacacctatgatctcatgatcagatccaacttgtcattgttttcaggaactttggtttcagaaaggaaaggcatgcgtggccaaaccaagaaaccacagtagtacgccggatcaacaggtcttttaatcatactaaatcatatgcaaacaagttgttgcaacagtgctgcaggtgaccagagagagagagagagagagagagagagagagagggagagggagatgtggatggaacaagtggaaagtttctgctgatgaatagaagcaaaagtcgtctatggagcttttgctgggagtcaggtgaacagtgtacttattaggggataaaaggaccattgcattacttgctaccgtggcaatggacgctattaaacaccaaaagcttccttttggatttcttttttctcactggatgccagctcgagtacacatgctcaattaataaagcaaagggggaaaaggaaaacaaagaacaacacaccagatgcacagaaataccactagctctcgcagctcaattattcccaaccatgtcatctcctcttactcaacgtatggaatcttccgtggttttataggacaaaaccctactccaagcaacaaaaaaaaagtcattacattttgggagaaagctacccatcggacgtccaatacccatcaaaaaatcggatggtcaaatgttacagttgaccaacaagtaaaacattaagttatatatggtgaaacaaaaaaatcagcaactgaaatatttaaatattttataaaacatggtgaagatacacgttgaaacatatcgctgtcacgtatgaaacaaaaagtattaacggattgaaacatatatttttcctttatcaaaatatagtcatgcgatatcttgttgtaaagatttaattaaaacaaatacaatggtgtgatcggatcatatattgcataagtaatttaagagaaaaatcattttgaaacttagtaaaatacatgcatgtgtgtatggatgaggtgaagagagaggagggagagagtagtagcaggtagtatcaggaattttgtgaaacacactgaacacgcacattgaaacatatcactatcacgcatgaaacatttagttttaacggtttgaaacacatttttttcttttgacataatataatcatatgatatattgttgtaaagatttaattgcaacgaatacaacggtgtgatcggttcgtagatcggataagtaatttagaagaaaaaaatatttaaagaggaggtaagaacaaaaggaaacaaatgggcatggatgttacaatgataggatcctatccatataccgatttgcagtagatagcgctataccaatttgcagtagatggcgcgtccgatatttcggttttgatcggacgtaggatataaagcatttccctacattgtgcccaccactcgaatagtccaactatgcgccagtactactgtactgacccctctaatcaccgggaggaatcgaagtactaactgaccttcaggattataaagctaactcgtacattttttgtcgtgccaaaggcacaatcaatcgtgtaattataggatctgagtagaactcgacctgttacatcaaaagacagaaagctagtgctctgtgattcacgtgggactaaaaactccatcaagtcaaactctcttctttagataaactgttaatttacaaacgagttgctgctttctttgaacggagacgtggccaatctggcaatgcagcaggagggaatccccagagttgttgccaaaatccggcggcagccaatgatgctccgtgccgacaagccggttttcgtccaggatcgcgatgctagcttgctcgcgatcggctgaatggttcttcgacaacttttgtgcgtaaagcatccccccggccccgggtggtctcgcgtcgcacacaacatgcttgggataccaacatgtgggaaagaaggacaacgtgctcggggggtggtaatacgagatgcttcgctttctctttcgacgtgtcgttgtcgcgccgccttcgcgcaccaaactcaacaagttcagtcgccgttgctgtgggagggatggctaggctagaatgcggcgggtgctatgcttgcctaaaagaatgaaaagaaggggtgatgtgttgtgtaggatttgcatgttgcatctgcctactgcaatgcttatgcccaattttagctccgccctaagcaagtagtaagtgtttgatgctgttgcacatagttctagaacattccaataagggagcttatgttctcatatagaagtacagcacaagaaacaaatatgggtctgttctgttgcaagagctgtagcagcattgtagcctgtcggaacaatgaagcaagcacaaaaaagaaagaaagaaatataagcatttttaatattcgacacagtttttgagatactactttgattaacaatatctataaaggtaaaatattttaaattaaaaaagttgcatattataatagtttgtttgatgataaatctagtaacatcaattttacatgattgagcttttttatttttttattaatagtcaaagtttcaaatgtttgacttgacactatgctaaccgtgtttatattttaggatagagggggtgctacaaaatctatagtttttgaaaggaattgaggaattccatagtgttcgaaaatcttcagtcatataattcaaacgaggaatttagtcctcttttaaatgcaggaatcttatatcctatataaaatcaccggtctctaaacttgtaccgctgtgtcatcccggttcctaaactcgcaaattgaccgtttaggttctcaaacttgttcgactgtgtcatcccggtctctaaatttacagatcactcgtttagatcctccaacttgttcagttgtgtcaccccggtcctaaacaggatggtctaaaaactttatatcaaaaaataattcataatttttttatgtgaactctaatgatgacaaactttatattaaaattgtagctctcgacgcgacctacaactttgtggttgaaaagtttttgaagtaaaactgtttagggtcccaaaatattgttgcatatttatagattttgaaattttaattttaaaattacattttgggataaaaaaatgacttaaaataaaaaaaaatcaactacaaagttgtagatcgcgtcgagagctacaagtttgatataaagtttatcttcattagagttcacatgaaaaatttatgaattatttttaaatataaagtcttttagaccgtcctatttgacccagatgatattcaaatccaatttttggtaccgggtgacataactgaacaagttggaggaactaaacgagtaatctgcaagtttagagaccggaatgacacagtcaaacaagtttaaggacctgaacggtcgatttgcgagtttagagaccggtatgacacagcggtacaagtttagagaccggtgatgaactttactcaaaaaatatatagaaatttccgcaaaatttgggttttaattctggccgagtttagttccaaaatttttcttcaaattttcaacttttctatcacatcaaaactttttcacacacataaacttcctactttttcatgacatcgtttcaattttaacaaaaatttcaattttagcttggactaaacacatcatctatcgaaaaagttgttcgggggggggggggggtatcaacggagtgctcgccacgcgtacagcgtgcttcccccacagtttccgaagccggtttcgaacttccgataactcggaacagtacagggggccgaccgattctttttctgattttggcgacgcaaaatctggctagcatctgatgtgaggtttgctttgtgggcccacttgtctgaacataaagtgatgggggaccttggtgtttgtaactaacctttccgtgccctccatacgtgttcccgttcccaaactaccccatcacaccaaaggtcctactccgtacaaagtggagtactacgtactctttattcggaaaactgttccactaataatcaatcttaaaccaaattaaccacaaatattgtactaccggtgcagtttgtttataaactagtggtaacaaatttatgctagatttacataaaaccagtggttaaaaatagactgtaatgccgattaatctgacatgggcagatgggctgtgctagtattgaccaagcaacaggggtagaaccgtaattgcacactctaggaagagacggtcccgtgacgacggcctgcaaccacaaccaccaccacctcatctaccagaaggaaaaaaaaaaaacaaaaacaaacccaacacgcgctaatccaaatctcctaacccacaaaataccagtgattagcacaaagcgccatccagcattacagcctcgggggtggtagttatggcgtattaatatcacccgcactttttttccctccccctcctcctttcctcgcctcgcctcgtctcgccgcttgagccctcctcctcctcctcatcgacccggctcctgctccgctcgccggagcgccgttgcgggcgcgtttcctccgcccgctccgcccgcagcgcgctcctccgcgcctgccgcctgccgcggtaggaaccggggcacctctctctcggcgttgcggcgggcgattcggagcggtggcgtcggcctcggatccggcggtggggatccggcgggaggctcgggaggggaatgtgggtccccgtttgaggcggtttcggtctgggaggctgcggcgagatgatacggtgagtgatctgcgggttgtggatggtgaatcgggaattgggggccgggtgtgtgggtggttggcttgtttcaggggctcaggttctgaaatgtttggtgttttttttttttgggtgggggggggggaattaccagcaataggtggatttgacgaacagtttgattcgttgtaataggatttttgcgctcgttctgcccctctgttgaggttgttttctctcggttttaggcggctcggattgctttgtttctgtcgaattgggagtgccgatgctacaagaattccttcttgttgttccgacggattacagtgcaaatccattcgtattgttactgtttttgcaccgaattgtggctattctaactgtttgattaactgagatggagttgctggtggttctagaaggtaatttcgcaattctccgcgcgctctgagttcaggtgttttttgaccagttcaattcagggtattaatttggttttcgcgtgattctcctggtgcctgtatttttaacttttggggagaatagtgtcttaatttgagtacagtgggttaattcgactgacatgtcttttttggggaattcgggctgtatttagtgtctgaactgtgcttaatatggtagaaatttcatgctagctctcgagcctgagatatttctaaattcaactgtttggtagatttgaccgaaatttttctggagggaaatagatttggccacctgtgcatgctatatttgctcatgtctttgttgtggtttcctgctatactacgtgaatttgtgggttcctgctatactatgtacgtgaatttgtggggtataactctaggtgctaaatttggcctccttacatgaactgatccggagggagttggaaaggaattttgacctgtatgaattgatttgacccaattatggtgttttgtgattgagatggtacgtagctgttgggttcccccgaataggatcaacaggagtgtgtgacttgttagcatcctactccatgtatttagggggattggtaccttactggctacagtggttttcatggtgtgaacaatcccagtaattgctcaccttttgtagaattcggtgtggcatttatgtatatagaccgccgtggaaaaggagcagtgcaatattccatttacacgagttcacatgagatgaaccttttaaccctgtccatttcactttagttaggcatattcatttcagtaggccacctctagctatattttagtaatatgaatataagtgcattaatcaggaggataatcacttagttatttttctttgtatgcagttcgagtggatgcccattttgttgaggtggagatacaaagcatgggtaccttcagctagtgagctcaggtggtgtagatcaaggtactgatgtctgcaggagaatggcggggaatgatgaagttgccctgaaacctgtttcatgcggggcaagattacggaggagttgtgatgcatcattgaggtttggagggtccatgagagacccttttttgaagcacaaagtgaagaagtttgatctatctagcctagattggattgatgagattccggaatgtcctgtgttttctccatcaatagaggagtttgaggatccacttgtttatctcaataaaattgcccctatcgctgcaaaatatggtacagtttcttctttttgttctttcgcgatatttttctcagttgcaaggtcaatggtgaagcagtgattttagtcagggcattgataatttggcaaaggtggtactatgattttttgaaatcaaggtattggcaaacacgaaagcctcttcaattgcaagtcacaagtgcaatatagtacagttaattactgagttttgtgtgacctcctggaaatagatgagccacgcatggaaaactgcattgcctaagaaaatctttttgtcagtggtggaagtctctagcctagattttttcacttatttattgtcttcactcaggtttctgtggttattatattgctgagactatttaaatttaccaggtatatgtaagattgtttcacctctctgcgcttctgtacctattgggcctgtacttatgaaggaacaaggtggacttaaatttactaccagggtgcaacctctccgccttgctgaatggtccaaggatgacaagtttgctttcttcatgagtggaaggtctgttagtctattattactgcattgctgtttaataagtgtttttatttatatttggatgtcatgtgaatatgtatcatcagaaagtatacatttcgagatttcgagaagatggcgaataaagaatttgttcgaagatactcaagtgctgcttgtcttccaccaagatatatggaagaagaattctggcatgaaatagcctttggcaagatgcagtctgttgagtatgcatgtgatattgatggtagtgcattctcttcttctcctaatgatcaactgggcacaagcaaatggaacttgaaggtatttccttgtttccttttacaaggcctatattttttttctctatttgcaaaatacaagagttgcaagtgaatatattgactcttttgcctgttttcccacaattattacataatctctcctgcatttataagaagaatctcactaaccatctccttgcctatttccaaggtgctccctccttcccaaaacatatgagtgttttcgatgaattaaggattttggtgaaaggtttaaatggctcactaatacatggtggggtgatggccattaataatagtattgggttgggtgtgggatggtggggtccactatgggtaaaattcaccttttacatgtcctaggtagctatattcgggacaatatttgaactaaaggtaatatttttggacggagggggtatttaagtatgggtagcatggtcattttaacaatttaactcatgtactcttaggtttgaaccttccttaatcattgtgcccactcaaaataagccttatattttgaaatggagggagtagttcttttgtttaccagtttgggagacatatttgagtaatgaaacgactgcactctgtgcttcccaagttctgtgctatttttctgcgtggcagcatttggcatgagcgttcacataaccaactgcacacttgcaatatcctcactcttgcaattaaatcttacccaagtataagtgtccatatcctgctatggtaatttgcatcattagaggatcttatctatcacatttgctatattgaactattggcatgttaaaaagttaattcttgctttgatccagagactttctcggttgccgaaatcaacactgcgtctcctcagagcagcaattccagtaagtggactgtattgatgatttcccattattttttatacctttatttatcttctgtgtttttttagggaataacggatccaatgctgtatattgggatgctctttagtatgtttgcatggcacgtggaagatcattacttatacaggtgcatgattaatatttgcatcatatttctgcgggaatggattttaatcccttgaggggatgttccctcatacacctttttctctcaaattcaatgcaaatggttgtgaaaaaaatctagaaaaatttgacaaatgtagagcatagtgacatctatcattccaccaaaaaatcaagttaaaactcaatctacacattgagaaacaaaaatgacaaattcaggtgtgaatagtgccaatactgttcatacgctggattttctttttaaatatcgatgtgtgagttgcgtttagacctaagattttgtggaatagtgtatatagatatatattgtatgaatgttgtcattttttttttgagatttttccataactatttggatggtgtttgaacaaatgagggacatacccttgaggggctaaaagagtttcccatatttctgctacctattcttttcgcagtgctgcacattaaattgaaattttctatttgttataatgtgagtaaatgttttgccagcattaactatcatcactgtggggcttcaaaaacgtggtatggcattccaggcaaagctgctccggattttgagaaagtggtatgtgagcatgtgtacgatcatgaaattttatcaggtgaaggggaaaatgcagcatttgatgtcattttgggaaagactacaatgtttcctccaaatattctgttgcgtcatcatgttcctgtctacagagctatacagaaacctggagagtttgttattacgtttccccgagcttatcattcaggtttcagccatggtgaggtttcgttacatctacaattctaaatgctgtcagtgatatctttatttaactgttggatatctcaatattatatttcatttaatgaacattgtaaaatgcaaaaacaactaccaggttttaattgtggcgaggcagtgaatttcgctattggagaatggtttcctctgggagcacttgctagtcaacgttatgcacttttaaagaggacaccattactaccttacgaggaacttctttgtaaagaggcggcacttcttgatcatgaattttctacctgtgattataaagatacaacaacattagctggagaaacacacagtcaacgctgtatgaaagttccttttgttcagttgatgagggtccaacatcgtatccgttggtcccttatgaaaatgggtgctcgcacgcattataaagcagatattgatgccacagttctgtgtggaatatgtagacgcgactgctacgtagcccacattatgtgtaactgcagaattgatgcgatttgcctttgccatggtaagattgtagtaacaccaagtgttgatattggctttatttgagttcatcatttttacttgtttaccttgttttgaagaggaagagattaggagatgcccttgcagttgtgatcgtgttgtatttgtgaggaaagacatatttgaactggagacattatcaaagaagttcgaggaggaaagtggaatactggatgcagtcaaaaagcaaatggctcgacgtgatggcgctagtcagcattctaactttttcgattgtactgatcatgaagctgagtactacccatactgcaatattcacatagatccatccccagaaatatatagcatttcagagacaaattttgttgggtatgacttgaacaatccacatcctgctgcatcaacagtaacattttcttttgtaccccatgagtattctacacaaagtgatgtaagtctcattcctgtgcttattctaatgtttatttactgtttttagcaactaaaaagaaactgatattatttttatatgtgcaggagtgtacaagttctaacagaagagccttgtctagctcttgtctcgagaatacaattacccctgaaaatgcaattagtaatgcttgccagttatctactcctgatcaaacatgtctgtctgacaaattggctgcacatgatactgatgattctgactgtgagatatttagagtaaagagaagatctggcctaactcctgagaaaagacacatggaagatggaacaacaaatttcactgggaatcaggtacagatatttctgtgggtgcttctcataagatgattaaaaatgcttactctcctaaaagtagatgtggtatagtatgtttgcagttagtgtgtacttgcgaaaattcaacagtctatactaacgtttcatgtctctttaccttctccaaagaaatacaaatgtgactgaagtgctgaacttcattccagaaagtgcttagaaattggttacttaatcttacaaactagatcaaggtgaattcgcagggggcatgattgaggtgaactgaaaagtgcttacaagatgcttctgatagacaccttcttgttccttgtggcaggtattgaaacggctgaagaaaattaatgcacatgacagacaagaacataagttacctgaactatcctgtggtgcaaggagtgaacctgtccatactgatgattgtatacattgtgttgacttcatttctgaaaatggagacgacttcatagctccaaccaaattgaagatgatacatcaactagatgcaaatattgttgaggatgaagttgcttccagccagaaatataatagttgcaactaccaatctccatctatagagcttgggccaaaacgcttgaaaattcgtggcccatcttttcccagcaggatttctgagctggaggtatcttgtagattccaggacaatgacttgggcagccagcatgctcgatgacgactgctaggccattggttctaacactacgtaagttaacaaacagcatccctaacttctggaagctgaaagctcctaccagccaaggtttccaaattgttggttggtcagctggtaacagatggctcagatttaattcttctgcgggcctccaatagaggcattgacatgggttcatggctggattcttgattttattgctgggccacatttgtggtagggggctgaaagcagtaggcagacaattctgatgtttttccactgtacatcttcacatacatctcctttcacctttctcgtaggtttttcactgtgaagaggttagtctactaccttaccaatttctttcattctttttgcacacatacacatgtacctagaatgcttaatcagatgcaaatatgaaattgatactgtagatcccatattgagtcagttattcaactttctactggtctttgatctcttcatgtaatctcaaatgatcaaattttcttttgtcattattggtaccggtacatttgtctccagatgtgttgataacttgatttgttaataaatcgattgatgctgacaggaaatcactagcactgattgtcatgttgcatatgcaacaaagtagatgctttgtgataatgtataatgaagaagcccatgtaaatgctcgaatcaatcatattctattgaaagtgggtgtaacagaaggaataaaggagctaattcagtgaggaaatcaaaatctgcacctaattgcatattcccatatgttggtcacgttcattacttcatttttccaactagaaaaaaattcagctcctagttgtttgatcttgatatactaaaaatctacagttagctggagattaaccaaaaggttgagatgaacaggtcgaaaatttacttagaaataatacaaatctgaattatccattgtttgtagtgacatattatacgttacgatatgtatgaaaggccatctttaaggtggtaaccaacaactatttattccgtaaatagcttcgatttgtggaatgaatctaatgctaattcccagcaagacttcaggtactccagggagaacgacttgcatgtcttttctatatgatgctttgacaaaattctgcaaattaggcataggccctgtttagattccaactttttttctttaaacttctaacttttccgtcacatcgatctttcctacacacataaacttctaacttttctgtcacatcattccaattttattcaaacttccaattttaacgtggaactaaatacagccatagtaataaattactatgttgtcatgatgggacaagcacactagcccgtcgcacgattatttgctttcacttacccatctcaccatcatgttgctccacctgctgagttactaaagccacgaggacttataggagccattaacttgacagtttggtatgattttgcacgactattatggctttacgtcggtaaagcggctattccttcatggaaagctcatgatgggttcatgaggaaagatttgatatcttttctaactttgcctattctcttttcattcttttgttggatgttctcaaaaatacatgtcatcaaatcatctcatgtctttaaagaagttaaaaaagaaggattctctttgctgccactctttggtgtccctgatgattaactgctgagtgctgactgaagctttgtcaagaccaaagaaacacttgtgcctgcccgtcctcttttctattctgccatcatgtcaacgtcatcccagtgataaagatccaatttcttgatttgcaagggctcggcattaaggcgaagatatgcatcatataaaatgtaagtgcgcccaaaatgccttcagattcattttacctagcttcttgtttatgaatattgttcaaagataaatgttctttgtcttaattaggaaaagactgtgggttccaatgtgtattctaattgaagaatgatcttaaaagaatcctgcaattacataatatttgcatacctttaaaaaaaataatgtttgtttatcggaaattgctgtatccaactaacttggttgaaaatccgttccaaatgattcttttccgcagttcattacttgattccatggtcattgtctaaaatgtctcgagactttaaggacagagcatacaacccacacttctatcattttcttattgtccaacatgctagtaactagtacgccttccgtccataaaaaaaaatctaatcctaacaacgaatttggacacatacttgttcagatttgtagctatagaatttgcctctttttgttagattagtagtactcctccgtctaaaaaaaataacctatgaggagatgtgacctctctaagtataacgaatatctcacatctcctttgaggttttttttggacggagggagtaactgattaggcatgtctacacggttttcttcatgtattagcctacttcctccgtcctaaaaaaaggcaaaccctgactttctgtgtccaactttgactgtccgttttatatgaatttttttataattcttattttcattgttgttagatgataaaacatgattaatattttatgcgtgacttgtctttttaattttttttataattttttcaaataagacgaacggttaaacgttggacatgaaaaccagggtttgtcttttttttttttgggacggagggagtacgtctgatcaagtgactagcatgctgctatgattaaattgggcgagcctgtcgagtcaaatcttgttcctgcagcttccaccttccccttgcatcttgcatatgtacatcagctcatatgaagtgcatggcagaatagctgggctgccaacatggggtcaccataggcccatggctgtgccatgcaagtaatggacactggtgcgtacctttgcgaataattgcatgccctctgcctctgcctggccatgaatggctatcaaaatcctcaacaagatgtgaccacactctgaacggggacaaaccattaaagtccacaaagttcaaggacttatatcttgaactacatgctcacaactcggaagtactatggatcaaatccatatgtgcagttgtgcacttgacgcttcaagtaatacatcccccttttttattatagatattccaagttggactatcagtatgtttgaaactactatcatcattcaattttgactatcaacttttctataatgttgatttcaatctgtaaaagtcgccatggatataactgaccataaagacgactatggaaaatcaatcctgctttatcaatagacaaggcaaatttcttgtcttttccaaaaaaaaaagactatggaaattaaataacatagacacagaaaatattaataaactctttggtcgcaaagtgtttgtagttagtcttcgactataaatatctttctaaatatttagattagatgcatgaaaaccatacagatagttccataatatgatcttataaatatcacaactaattaaaattaacgttgaaggttgcatttaatcagaaagaccattttatgccaaaaaggcattgcttgttgtatcacagattaatactctcgtatgatgaggacatatctagtgaaaacgagctaagtgttggaaactcgtgaaaatcatacttaaaagtttttaaaatttatgaaaaaaaactagagatatgcaatacattctcaccaaatctcaactccaaactcaacttcgtttaagagaaacaaaaaagacaaatttcaggtgaatagtttgtctttttttaactcctaaatgaagttgagtttcaacttgagatttggtgagaatatatttcatatctacacatatctctagtatttttttataaatttacaaaacttttaggtatgattttaagaagtttttaatacttaactcgttttcaccggatatgtcccctcatatgattcctggacttgaagttttaacctgttactgttagtctgctactgtaggtactgctgaactaggggaggatccttctaaatagtagaagttcacatggcttgtgtctggagtagtctgaaactgcaaagtcgagtagcatgaaaaaaccttctctttgaactgatataatttacttcatgcagctttgttgactgtggcatctctattagccagtccatatgaaaaagcaacgattagttctttgatcttctccgggctattaacaccaacagtatatgcattgcttaatcatccatatcctcattaaactaagcctctagtactgacctaagtaaatcaggcctgataatataatcattatacaatcatattccttgtcggcatcatgatatcttattcctgcttataactagctatagatcaaatcagatttgttctgtagtggcttctattgtcagtcttgtcaattgctcaatccagtaatttataccctgagcattatttttgatcctttgacctgtcagtcatttctctatgtccacatcatttattaagaaatcatcctgtctgtacatggaatctggtgttcagattatcaaacccacgatgccctaggtatgagagtgtgctacagtcagcacaagataagaacaggcaggctaccacagtgctgtactgtactgccattagtgtatcactcctctactcttaccactaagaaattcaaggaggattggttgctaatatgatggtcaatttgtgagcaggttgcaattttgactgtcggtagttggaccatggcacggtttagtgggggccacgcagcggggagccgtatgataggtgggtccaagcggccatgaccggatggcccccatcgatccatgctcagggtggtgggcacttggtacaatccatgcaggtaacccgctccttgggcattatgtgcctccacttctcatttacaactccgtccgaggccggccgggtcggtctcgctgatgtccccgtccgcgcacatggagtgatgttggagattgttcctctaggtttagtaaacacaggtttactagctttatgctgctctccctttcttctcctctggaactcaacaggtatacacttctatgcttcggtgagacaacggcaattgatgctttgcacgcatgtatgtctcctacacttcggtgattcaatgcatgtgtgcgtgtcctattcttttctcttcctgtaaagcttattaattttcagatgtgtcacacgaaaagcatctagttgatgatttgataggattattaccactagttgaatgtcccgaaaggggtgagcatttttggtttcggagggagatgtgtgcctgcaacgtcaatttttggtcgagcaaggcaacaatccccctgtatatatgctcaaaacccagggaccatgcatgcatgtctgtttcctgtccaaatataacaagctcacaggaataatagtcttacagaaagtcagaaataaacggacaccccaccttattatttgtccatgtctggatcctatcgatctgactataggtgtgtgtgcaaggcgcgagcgcgcgctgcagtttcttccacatctgccagatatataccggcataaacaaaaggggcgatgggccgcctgaccgatcgggttattaattaggtgactgttctccctattatgagatcgatctggtcgtcatcgcatcccaccactgctgcgtctgcagtctttgcgcgtgtgcaatcgccttcatgtgcatagtacgcgtaccccctcctcccttctcacgttactgtttccgcgacgccagccgcccggtcgatccatcgattcatcctgtcatgcgcgcggtcacgcgccaattacgcggagagaatgttgtcgcgctcgccgtcccatgcacacgctcgatcggtctcacgcgccggcctggtatctatctggagtcatcgatcgggcatgcagtttgcggagggccttctgatcggtggatcgccgtgcgctgcgcgcgcggcatgtggggacgcgcgacgacgacgcgaggcgcgcggggacgaccacaccaacaggccggcgacagcaagctgctacgtacgccgcggccgcgcgcgcgcgtatcgcgtcgtaccgtacgtgcagaaatcccgggggggagcgaggggggcgcgagatcttcgatcgatccgttccttcctcccctcgcgcgcgcggcagcggccgtgaccgcgagctaagcgaaactgatctgacacacgcgcggtcgctcgcttccgccgcgcctgccatgccggccgcctgccgtgctcagccatgattccacgataattaatctcgtgttcagcgtgagttcgaggcaggaggagcagctaccgactttaattaattggagagaaagtactagtaccagtaccaccaccgatttttgggacgcagctcattccatctaagctatagctacctagctacacgagggctattaactgattccaaacagctcgttctctgtacacgagcgaaggaggtagtagtagtgggagtacactgatcagcagcaccagctaacgggtagtatgggtgcttaattaatctcgcgcgtacagctacagctaacggcttcgattttgtcgtgcctgccgcgtaagtatatttcagcggctggtgggtaatttggtgtttaagccaggcccggcgtacttggcgtttgggagaacatgctgcatatctcacctatatatcgcaggtagatgccatggaggttcgcacggaatcatggagtacataaaaaacaaatactatctccgttctttaatctaatgctgttgactttttatcgatgtttgactattcgtcttttctcaatataaaaatatttaaatcttgcttaaaaatatttgataataaatcaaatcacaataaaaataaataataattatattttttttaaataaaatgaataattaaacatatatcagagagttaatgaccgacctacattaaaaaaacggagggagggagtagtatgtgtgtacgggtattgcataaaggctaaatatagtttattaaaatgtcaaacgcatggagctgtactgctaggtttcatcaaagagggacagatagaagtgaacagctttggtcgatcgtggggggcttcaaaaccacaagagagattattgcgctgtagtgtactgtatgatatatactccatatatagactgaaccaacatttattaggtagctagggagataatcagtttcaaacgtctcggtagatcttgtttttcataaagatgttgacaacatccttcttaaaattcacacactgttagtacaggtagttagcatgaacgctacatgactataataagatcaagctctgcatggattgtatagcacttggtcaccaacaaatgaacaagaaaagcatatatgcatatatagcctgaaaagggaatgataccaccacacacctataacattcccttcccttcccttccttcccacgcacagcatatatccatccatcctaatcaagtgtcattttctcccacagctatctgtccccaaacacatctaattaaaagagtactatgtgtgagagagaagggattgatagagagaaaagaagagagaaggggcaacccccaaaaaaaaaagaaagttggaaaagaaagtaaaaggaggtgcatggtgtggaagaaaagaccaatctatatcttccatcctaggccacctccaagcaacaagttacaccccctctttttcacacaaacacactgcgcatacaaacacacactcctgtcctttccattccatctctctctctctctctctctctctctctctctctctctcagctcgtctcctacctttcatccccctctctcctccatcttccaagcaagaactcctctctcttctcttctcttctttttcctcatcaatctcaattcccaacaagatcaagagcaagtacttgttcagccagctgcgcataaatatatattttttgtgacctctctcaagaagtggagttcttgagtcatcgcaaggacaagaagagatcatcaatggagctgttcccggcacaccctgacctgcagctccagatcagccctcctcctgccaccaagtcaatggacttagggttttggaaacgagctcttgaaacctccacgaccaccaccacggcggcggcggcggcaagtacaggtccttccgtcgctacttcctcctcgccgccggtagcgagtggcggggttggcggcggtgccggcggcttctaccagcaggcggccgtcgcgcctgcagctaacggccacggccatggccatggccatcaccaccaccaccaccaacatcaccagctcggcggcgcactccagttcttgcaccgcacccagcccatcccgccgcaggacgcggccgccggcggcggcctgcaggacctggcgttcgcgcggcccatccggggaatccccgtgtacaacacctcgcggccgctgcccttcctccagagccaccacctccagcaccaccagcattgctacgccgacacgatcggcgtcgcgccgggggccgggccgaggtcccccagcaagcaggcggcggcgctgcggctcgccgcggcgcccgccaagcgtggcgcccgcgcgccgcggatgcggtggacgacgtcgctgcacgcgcggttcgtccatgccgtcgagcttctcggaggccacgagagtacgcaaacctgcttgctgtttttttttcttttttttgcatcttccaaacttcttcatgttagctaaacaagaattgaaccacatatgctacgcagtgttcctgaattttttttcactaattttctccaattttggttttgcaggagctacacccaagtcagttcttgagctaatggacgtgaaggacctgaccttagctcatgtcaagtctcacttgcaggtgagtatatcatctaatccttcaagaccggttaattggttaatctgatatatatccggctgaattaagctttctatccctctctcagaaattaaaccattcgagtacttccttttctaataaagagtcgtaccagcgtagatgtacatctactcctaattaacaatttatatccacaccaaggagtactgtacaaaatacaaatacgtgcctggtatatatatggaagacattcatattatacactattcctttcctttatctgaggacaaaaagttaattacgttcgatcctttctcacacacagtagctcatgcatggaatagtcatttctcagttcacttgccggctgggcagtaaaaacatctctctctctacaagtttcactccccacatgcatgtccttggctagatagatagagagagagagagagaagagagaaaagaggtgtaagcttagcttttgcaacacggggggagcagcttttcaataaaaactccgagatgagcagttggggcacaaagctatagcagcagcacatatgcaaacgcagcgtcagtgcagcgtgttgtttggccattaaaagctagccgcggcccggagacgagacgacatgcatgcacgcaccgcgcggaggatggatggatagatgcgtttctctcgctcgctcgatcgatcgatcgatctcgcacgcacgaagaggggatcgaaagggcattgatatgcatgctgcccaagagcagatcatgggcaagtacaaccacggcatcatttctcaataattaagcttcaacacacacacaccccggcctctgcctgctttgagctgcatgctgcacgctgcacagtcgtagtggtagcagcagtagcagcagctgctgatcgagccatcaatgcctccgtttgtgctgtgtgcatgcaggcgaaaaatttatggtcacttctctctctccttgtactactcctaccactactgctcctttagtttttgttttttgtttttcttttcttttttgaagattgttacggaatagtagtccttaggagtactaatttgacttcatttataccagctctccatccatgaaatgcatgttatgcatttggaaaaaagaaacgtattatattcctcatataaaaaaaatcctatgtattcctgaagaatattggttaccccaacttcatgtaagtacatatatatatatatatcaatgatatagctaattctccttgcagatgtaccggaccatcaagaccactgaccacaaacaacctgctccaccatatggtatgtgtgtatatataacactaatcacacacacaaaaaaaaaaggggaagaagcatcataccgatcgatggtgtatttgatcaatactgaaacgttgcaaaaatatgttggatttgtagggcaaactaagactatcatagagatcccagacgacaatctgtttgacatcaacaacactagtgggtcagagtcttctgttcagcaacaatccaattttgacggcaatgaacaaggatccagcatgtgtgctctacggagcaacaactcctcaaggtgacatacatgcaaacagaaattttaaagccattatttcttataaaactaattgctaaactttagtagttcctatgtttgcttcctaatgctactcctatatcatatgagagcctgctcctattccatttgatctcatcactctggtgacattggtcttaatatcaagctctagtagtagtagctagtgtactgaacctgaagctagtgcttcttgggccctagtattcgatgacaaactaaatgttcctaattaatgtagctattactggagtagttaacagcagctagcactgtagaagtactccaagccaaaggcgaattaacacagaaagcagctatatatagtcagctagctacttatgtctggaggtcaaggctgcttctggttacatgtagctagagactgctatattatgtacatgtagccaaaaagtaccacgcatagatacacagaaattaaatacatgtacagtacattagtactcctttggcgctttcactagctatatatatttgcctttgcatcttttttttctttaaaaaaaacaatgttcagaattcatgtatccatgaaaaaaaattactagcagtttactcacagcgcaatatttccactgtatatatatcttgatttggttggtctttcatgcatgggagtcgtgctggctagcttggcattacctgcatcaaacgtttggttggacttcaaactaaatattcctcaaaatcaactgttacattaagaatacattaagaaccagctaatgcaaggcttcagatattcttttggactgattaaaccagtcgtatgctcctactttaggcgaaacaatatattcctttgtctcattttctttgtgactactgcactaccatatcatcaaccacctccgagtgctcacaaaaagcaccagggctcatacctttgttccatctgctccccatgatggtgcaatcatctcccaaattataatattaagctagctccgagattgattagtatatatgctaattaagctatagcaaaggggacatattccccccccccccccactacaagagacaatagagttctccactagcagaatcttgagaaactacatgagaaacagcatccatatctatagcctctcctgattatattttttgttctctctctttttttacatgatgtgcgatggaatcttttagaccgtggaatataatctcaataagaaatgaaaaaccgtaccaaactaagaatgcactcgggcatgcattcatataggcacactatacatatagctagatcagtacttgtggtgtcttgtggactgtgtgctcagtactgtatgtggtcagtacatgaaccttcctggcagctacatgtgtgagcaatatatatgcacagatatgaaggcattgttcaccgtgccagatcacatgggaggagcacgtagtctaagcatgcatgcacagcttttaccttggattagccaccctcttataaagttagcttgtcatttacagcatcttataacggtgaaattaaagtagggtgttagctttgttccctgccttttgttttctctcatctctagcaatggactcccactgagatgaaaaagagatatacatagatatataggcatttgattctctcagtccatgatacgctttttctctccagggtaatttaattaattcattcatttctctccttgcttaagcagtagaggggcctggttccatgacaaatcaagagatgctacccatggagacatcaaatccttcgaggtacccactttgcaagccaagtttcatcattgtctccaatacctctagctcactaatggccatgatgctacatgctagagttagtgcaatggcgatcattcctttgtttgatcacccctctcgattgattcattctttctttcatgcatctttcgacacagcttccttgctgagctttgatcaatgcatattgtcggcaggctctaactttagcttatatggggggccatcatatcatcagtttctgcacagttatcacatctcatcatcgtcatcgcaatcttttattctttttatccctgcatgcactcatctaaccgagatcgtactacattatattgcaggacgtgcagtcacagagccctgaagacgacgacgcctccgacctgaatcgccgccgttccaaataccggagacgactgtcagcgccatgaaacccaacctcgacttcaccttgggaagaatgtaatttaaccatccatcgatcgtcgacgacatttcgatcgatcgatcgatcgagatcgcatcggagattgggtgaagagggctagctagctagctagtacatacatgatacatcatgtgtcaaaactaagtagggcagaatatgagaatgaagtgaagatcagatgcacaaacacacacacgcatgtgtgccccatttgcactacgaagctgaggatcagagaggagatcgaccaaagctagctagagagaagaaattaaagcaaacaagataactgaggctgaggaataagataacactgcaaccgttgatccaggaacaaagtgcaaaaggggggggggggggggggggggttatcgatctagggacatgggctcgtgcgtgcgtgtgtgtgtatgttctttgtgcgtgcgtgcatggtagatatagagagagatatatataccgctagatcataggctttatcaaaggcagggcaagagcaagaagatgggtgccttgcttgcctgcctgctgcttgcttgcttaaagctagggcacatatgcgcattgctttgttgcttctggtttactactactactactaaaaacatgaagagagctaagctagctagctagctatatatatacactggtggagaaatgctttttagtcacggttcgcaaccccctgtagtcccggttttcaaaccgggactaccaatccgggactaaagatcgctatctttagtcccggtttaaatacctgggactaaaaatagatctttagtcccggttagtaacaccaaccgggactaaagagaggggatcttaccgggactaaagagagggttgcggcagtgagatgatcccctttttctttttttccttttttattttctcccaaatcacgtgggatacatatcccaaatcaaacccccaatccatatatcgaagtaacatctcaaatctacatcacaaatcaaatcaaagttacttatacacacaaataaatacatcacaatatcctaagaaattactcaaatacatcacagatccaaacaatgaatcacaaatttgtaacttctcagtcaaatacatcttagtaaatcatcacaaattaaaaaaaaaaaagaatgccgctgccgccgccggtcgccacgaatgacgggcgcggccccaccggccgccggccgccgggcgcggccccgctgcccgccacgcccgccggcgcgcgcggcgccgccgcccgccgccctccgccgagcgcgaccccaccgggcgccgccccgccgcccgccgaatgggaaggggaggccggccgggaaggggaggaggaaggggagagaagggggaggagaggaggaaggggaggagttggagaagagagttagaaaggatagatctgaggagaggggatgagattcgatctgttaagttgtaactgtggagaagaggataagggatagagattatatactacgtgtttaattttagtcccggttggtactatcaaccgggactaaagatcaagaggtactatcaaccgggactaaaaatcatcttgatatttagtcccggttggtagtaccaaccgtgattaaagtggtgatctttagtctcggttggtgttaccaaccggatcctcggccccctgacatacatctgacaggggatgaaccgggagtaaagatcatctttagtcccgattggtgttaccaactgggactaaagatcaaaatttttataaccgggactattgtggattttgccggaccaatcaaagatggtttcactatcagttatatatatatatatatatatatatatatatatatatatatatatatatatatatatatatatatatatagagagagagagagagagagagaggacgaaatggatatgatgcatggtttgtacgttgtgtatgagatgtatacctagctgggggccaagcgttaagagaaagatttcatcttttgttatgccaaaaaaaaaagtgtaaagagagcgcgtatatgtgttgtgtatatgtgtgtgtggaccatgcatgtatatggagtctgattgctctgctcggtctgtctctttagctagaaatagattcctagcttcactgtagtatttactatgcatgtcatatataggtacgagtgtacgaccctgattggatttgtagttcatgagcgacaaaaaaagtgatgaataaagaaaaggtcgagaatatggttcgatctcttgaaagtaactaattaataagtcattcgtttcggattgactgagctcatttaagaaaattttagtatattgcaaggtttccatttgatttggtatgtatggatatatgtcgcgagataaatcaagccaaatctctatgagaaagggaaagacgaatcgatatcgaatcataaccgatcgtacccctctatctctagctatatactccctccgtttcgaaatgtttgacaccgttgactttttagtacatgtttgaccattcgtcttattcaaaaaatttatgtaattattaattctttttctatcatttgattcattgttaaatatatttttatgtaggcatataattttacatatttcacaaaagtttttgaataaaacgaacggtcaaacatgtactaaaaagtcaacggtgtcaaatattttaaaacggagggagtatatgtccatatatgacagtacaaggtagtgacagcgagcgaatgtcgccctccatcctctagctatcagaatttcaacttgagaatgcaaacatttagccatgtcgaaattgtgcccacttgcgcaaactgacacctgagaattttccaatacacgaattgtaatgctctggattacgacggtgaatcccatactacccccttgaaattatttttgttgaaaatctaggccaaagtacgaacttgatctcgggaaccatataactttataactttggtcttaggcaccgagtaagatatgtcagcgcgttgtgagtatatatgtttattaaaaaaaaagcctgaatgagaccgaaggagttcgatcaccaagatcatcggtactacagtagtatatttttatggtcctcacttggttaattccgatcctcaaccctgtcataccaacctcaactccaaaattaactgttactactacatcaatctgaatatatgatcgaatagtagtaatttagaggtccgttcattcatactccatcgtcccaaaaaagacaaattataagaatgtacttagacacatgtttgtccaggtttatctctaaaaattagttttttatgggacggatggtgtaggcccgacagtgaaatcaatttactacagacgccggccggccgatataccaagaacatgcatgtatatgaatgcattacggctgtaacttgcaacagcagatttgtcaatttggggaacaaccctagctatggatatggccgccgtgcatgtgtacgcatgcatgcaattgtctgcgtcaatcactcactcactcagccccatgcacgcacaaagaagaggttgaaaaaaataggccgtgtttagattctattttttttaaaaaaaaacttctaacttttctgttatatcaaatatttagacacatgtatggagcactaaatgtaaaccaaaaaaaataattacacagtatgtccgactgtaaattgcaagacgaatcttttgatcttaattatgtcatgatttaacaatgtgatgctacagtaaacatttgctaatgatggattagttaggcttaataaatctgtctcgcggtttacaggtggaatctgtaatttattttattattagtctacgtttaatacttcaaatgtgtgtctgtatacttaaaaaaattttgacacacgaactaaacttacaaccatagtaagaagaaggattaagaagaggacgaggacatggaccaggaagaagaaggaattgaagtcaaatcttttcaggaatgaccgtgtgtgcgtcgggttgggtggacggtaagatcgacgacgtccagcatgtgatggacggacgatgtgaggcctgaggtgacctctcttggaaagccttgatccaacagccatgcaagctgctatagctagtactactagcgtttacctctctcctctctaatcgatccatcactagatctgccgatttttgttttggggcgttttctgcccccgggaatgcatgcatgcatgcatgcaatgcagtgcaatgcatatgcatacggaagtggctctgtgcatatcgtttaaatattttttaaaaaattaaattaaaagaatattaagatagatcaatatatgatataaatccttccacaaatatgtaagttgaaattgacttatacaatttgaaacaaaaatacttcctccgtttacgttttataatttaagtcattttagcatttcccacgtttatattgatgctaatgaatctagacatatatatctatctagattcactaacatcaatatgaatatagaaaatgctagaataacttatattataaaacggatgaaagtaacaaatttgaccgcaaattacatgttatattcatcttcaagttaattatttttgttgttgaatttgaatatacatgcttgtggagtggcttaaatataacatatcgatatattttactattttttttaaaaatgatgatattttaagtgatatgcagaaataaggggacaccccttaatgtatgaatagagagtttgacatgcatatgcgtggatatccgagcaaaaagctcatctagcttgtacagctttccaaaaacttctgtgagcctgaacaggctactgatcgacctgacccctcttggattggattggtgctcttggctagctccccctcacaccaatttccagggcttgtttggattttacaggaaaagtggcacagctagcaactcctatcccaaaataaatttcaaacatctctcaagaaaaatttaatatatagagagaaaagaccaaagcgccacacgttaacaacaaagtaatattgatagatgagtatgtaagtgttattaaaagataaacttcttgatttgtgaagcaaagagatacaaagtgatcgaggtaaagagagagatgggagaactgacgtgtggatgtgtggcactaggggtatttctaaaacttcataattttttctcttatttaattgacagtaaatgaatattctaattgatgtggtgtctagtactccatctatttcaggttataagacgttttgactttggttaaagtcaaactgctttaagtttgaccaagtttatagaaaaaaacagtaacattttcaacccaaaataaatttattatgaaaatatattcaattattgatttgatgacactaatttagtattacaaatatcactaatttatctataaacttagttaaacttgaaacagtttgactttgactaaagtcaaaaacgtcttataacctaaaacggagagagtaacaaatagccacattttgagattttcttctccaaaagatttacttttgccataaccagtagctaaaaccaccagtttgcgacgcctacggtaaaatttgcctaaaatttattgctataacatataggtcaaaagctgacatatcacttgagctaatgagaagagagggaagacttaggttgcatttggaggtatcggttgagaacttcatctcccagcacctaaaacggaatgatccattagtgcatgattgatcatgaacaaaataaacatgaaaaattgattgatttaatattttaaaacaaattttcttagaatcttttctccaaaacacatcgtttaacagtttcagaagcataagcgtgcgcaaaaaaaaagaagtagaagttaggaagatgtggtaaagaatacacagttagggtgcgtccatttgaggcatgggagggagaaaagtccctcgtttttctcacgcatgttctcccaaactgtcaaacggtttctttttgaagaagtttatatagaaaagatactataaaaatcatattgatctattttttaattttagaataattaatattcaattaatcatacgttaatgacttatctcgtttatgtatgttcttgatattctcctttttctcctctcaaacacatccttaggtcagatgcaggagttagctcatgtgcaaaaagtccaggattgttaattggacccaaccaaaaaatacaataactcgatcaatgcaataaggtatatatgctaacagtgtccttgtcataaactcaagtgcaaaaatattgtggtccgtgtacagatatttatcgctcttcttcctttaattatgcacctgtatatatgcttattgtattgtggagattgatggatactctttttcagtttttctctcttctaactacgctacctgaagactctgtccattcgaatcaataaggattttttttgcagcgttctcggaaaagggaatcaataaggatttaactggtggcactacactgcatcatgtcatctgcgatgggcgcaaaccctcacctttgatggaggtggccctggtcagaggttagtggtcactcatgactctgagtcacctgagacggttaaagacccgtaagaggtaagagttacctttgacggactgcaattaaaatccatcacaggtaaccttcatctgtgataggtaaatattttaactcgttagtagcgatctttatttgtgatggatcctaattgagagccatcacatacctgaaaaatagggcaaaaaaatatatataatgatgtaagcctagctaacagaccttcattaggcattcacaaatcacagaagtactcaacattcacaatcacaatcatttgggcacaaaacagaatcacaaaaaccatcacaatcacattcatctggccaaagagcaaaatgacattaacattcacaactacacaaaacagaatctcaaaaatcaaattcacaagcataatggatcaactcccatgtcgttggacttcacagaattgctatatatgtcactgccgccgccctcatagtcgctgtagccataaccatactcgctatagacatcaccgtgggcaccgacgttttagtctccatcgtagcctctgacctcaaagaggccagatctggcggccctgagaggtggcggtgatggatctgaaggggaaggggggtaaagatccagcgattggggcccagatccactctccaggcagtcgagggcattcagatctggaggccgacgcccgcgagctccagaatggctcgacccgacaaaggtcagccctcgtggtggagaagccaacctccggcttgcttgggccgacggaggtggaggcggtggcagaggcggcagacagcccacgggcaaaggcggaggcggaggtggcgactagaccatgggcggaggcggttcccgacgcgctagagccaatagaggtggaggcgatcagatccaaccgcagcgaggtcaggggtggtcagatccagtgaacccgaccttaggtaggccagacctggaggcggaggacggacgacgttgggacctcaagaggcggcctccactgccgagctcctactggcgtccacgcggcctcctttcctgatctcccacctcctccaccttcgcatccaacaagcgtcgacaccggtgccgcgcctccacctttggtacccgcagccgctggtgacgcctccacctccgggccacgcacccgcattcgctgcctccacctccggtccccacaccagctgatgaactgagaggaagagagaaagggttgagagggagagagagagggagattgagagagataagttggagaaagagattaaaaacgatttggctatcggtggcctgcagtagtgacggcatggaaaaaaaagacccgttagagatgccttttcgtctttaacgggctatgctgttgcacccgtcacatgtaagggatcacctttgacgggtctctatgtgggtccgtcaaaggtgtggtctgtcgggttcatatataggcccgtcacagataactatttactcatgaaggaccgccgtctcatatcctcatattgaacggactccagttaaacttatcacagatgaggtcatcgatctgtgacgaagcactttggcccgtcactgataggccgttgcagatgggcagatctggtgtattgtggaaaccaacagcaaaacaaattatattattgcataaacagcactagataaaaaaaatgtctgtatcatttccccttcatattggctgccaaaaactggaagagccaaacactaggcaacacatccagctacagtaaatcaataaggacaagcaacaccacacagcgcgcaaaatgagagatatatcgtttgattgaacgtatggggacgaagaccaaaattcttgctttgcgcgattcgcgcgggttccatgcaatattattgcgtatatatagatggcccacctgcatacagacatgcatactatacagtgcatgcatagctaagctagctaggatgcatctatctctgcaactctctctgctgacttctctgatgagctctctcggatcgacatgcatgcatgcatgccgcggctgactgagccacaccacaccacttgcttgctttggtcgattgcatgccttgttttacttgcattcgaatttgcactcactttgaagcagcaacacatgttacattatttttttttcttcactattttcagtttggagcatgctagaacgtacgggtgattttttttcctgctcttgatgagatattggtaggtagtacaaattttcgtattaatttgtgatactttctggtatctcatgaatatataagatatcataagatattaagttttacatgaaaagtattacccccatttgaaaatccaaaaaaaaagtttgtatgttctttaaaatgtaccatgatatccctgtatccgggtagtacattttagaaaatacacaaaaacaattatactactattttagaatggaggtgatagtctatagatcgatgcattagatttttttttcaatatttagcctccacactctccaaaactgctgtgttggttggatgatgcatggatccagtggtgaggtcaaggtagggctcatgcatggatacagcaggagtactacatgcacgcactcctctcttttccccctcaaaataccactcacatatgctccctccaccccataaaaaaatcaacctaatattagatgtgatatatcataatattatgaatttgaaccgacctctcttcagattcttatcacatccagtattaggttgatgttttatggaactagatgagtaaggtcgtgtttagttgttttggcaaaaaaaaaatgacgtatacggatgcatatttgaagcattaaacgtagattaataacaaaacaaattacagattccacatgtaaactgcgagacgaatctattaagcctaattaatccgttattagcaaatgtttactgtagcaccacattgtcaaatcatggcgtaattaggctcaaaagattcgtctcgcaatttacatgcaaactgtacaattgttttttcgtccacatttaatgctccatgtatgtgtccaaatatttgatgtgacgaaaaaactagaagtttcaagggaactaaacacagcctaagtgcaaaatggatgaagctgacatacatgattggacaaattattcaggcagagcggcacatgatcaatagtaacccaacaagcaaaatagtaatcgcatggagcgtgacatatcagtagtagtagcatggatagaacaagcggcaggctagcacacgagtctgagatgaagactgaaacgctcaggccagagctcgagctgagaagaaagaatctctgatcgatgaagactgcactcgtcccaatgcaacaagaagaagaagaagaagaagagaaaaaagaaagaaaaaatgaaaacggggcatgaatctacgcaccgggaatatgagaaatgaatgaatgaatgaatgatgaggcactccattacgctatgattggggggcgcccccatgagaaacaacaagcgaccgagtagctggcacactgccaatgctgctgccagcagcatacagtagcgtcgctagcttgccaaagccacgcgctgtgcagcagcatcagcagcagcagcagcagagacgacgacgcaggcgcacgcagagatgcaacagtggatgtggctgggcgcgcgcgagaagaaagagatcaggtcttatcatgtcacacactaacgcccggtgcagacggagagagagagagtgcagtgcagaggccggcagagagaagctatactacagtgatatatatgttcttttttttaacgaagctaaaaataaagaaattattagtgtatgattaattaagtttcaattattataaattttttaaaataaatatatttgatattttacattaatttatatatatataagttgcatgaaacgtaaaaaacgtgatactacctgagtacagggtggggtgctgttgctgcgtgcctgcgtgtacgtcgtttggtggatctggtggtggccggcctcgattgcagcaaaacgagagcggcagcgttggcgttggcgcccaatgcatggctcgtacggtggccgcgatccatccgtcgtcgttgtcttcgcgtcggtcctgaccgcgacccgacatgctcgcccgctcggcattcatggcccctctctcctataccccacccacactggtgatcagtggtcactgaccccaggtcgatctctctcgtcttcgttttaaactttttcttactacacgtgaagtagtgaattatgctgatcttttgtgagaaaatgctgtaaaaacaaaaagggaataattcttgggcggttgaggcgatctgccgaaagccgtagcacaggacgtgcaataattatatactttcagtctttcaccagtaaaaagcgtcgttgctccacacccctttggtaaaagagcggttgcccatttccggtgcagtacggaaccaaagggggctcacacacagcgcacgaagaagaaagaaaggggcaaacggaaaaaaaaaaagaagaagaaaaagaaaaggagaaatcccaaccagcggatgaacgtgacgcgacctccaaccacaagcctctcgcctaattgcgcctgattgggccactaacgggcccacaggacacagcccaccacgaggtttgttgggccggttttgatgggcctgatgggccttcgggaggaggcggtttttttccgatcacccaacttcgtcgaggagggaaagggtcgagagagaggtcagtagtagcgtagtgagcggcggcggcggcggagatggggaagggcggcgagctgtgggacgattcggcgctggtagacgcgttcgaccacgccgtcgccaccttcaaggtaacgcgcgctcgtctctgacctccatggcttcgatccctgtcccgctccaacctgattgcgacctgtttgcgccagttgcgtgcgtagctagggtttagggttttggtggggagtttcgcgttgcgagttgggggccgcatgaggctgctatatttggtgcgtggcgtgggtgggtgggtgggtgcggctttgattttgattcggtttgggagtgttgttgtggtgactcgaattttgatgcctggtagcagaaatccttggaacgtagtatacatgtttggaatagatagggtttttgtgtattgttcattgctggtatcatgaaccattactaagatgtcaccatggttatgggagaatgctgggatttttgcttccccatttgcacagttagctggaaatttggttcgcatttggttaactaatcctgatggttggcacttgtcaggctatgcatagcaaaaacacccaagcaactacatcggagaatgaggaaccaggagatcctgctgttgctgcccctgctggagaagagaacatttcggctgaggtggccgatgagtaagtattgagtatactggtttcttggcaatatcagtttgaagcaatagattgttcttctgttgcgctagcaatagttgtcgtgtgaagaaaagagtaatgtagttgtgagttgtattggtacttagggagtggctttattcaattacttctgttatagctccactttttatattgaagtttaagacttgaatgagctctatacatgtggtttgaaaggtactcccccatcccataatataagggattatgcctttttttttggcaaaaattaagtaggaaaagggcatgtcatggtagttattatgataacttcacctgtttcctggaggattgtgccgctagcttcctagatatattcctagccagttcctggtaacatttttacccaggttcatccctgattaaatctttaccacgtactatacgttcaacaactgacttaatttaatgatgataacaggaggcacttgtaactttaattttctagttttatttctttaaaacatagagagctgcaaccgtgcaatggcttatccatgcgccccatttccccctgatcttgccgtgcactttaattcacatttttcatttatttgcacaatttaagttcttgcattattgtcttggggcttcattcttccaagaaataaagagttattaagtatcgctttgtttatgcatttttaaggctcatagagaaggatggtagccagacagaaccttgtgaagcatcggagacaccatatcagacccatgaggaaagaaagtccactgagcaggctcctcttcaggaaaaggatctggataaagaggcacatttttcagaacctaagatccatgcctcagatgttgctgatgctgagcaaaaagatacctcaaaccagcagacctgggactacaatgaattggtaaaaaagtactatgaacttgaggagcaaagccggaaagttcttgagcaactccatcaaacaaactactggaattaccaagtccctggtcaatcttcagtgtaccaacaaccgcaagttcctgcctatagtgccacagcaccagatccgcattcctcaaccattcaatccccatgctgttgtgcgaatgtacccctggtatcagtctcctgctgttcaactggccagacgagtggggtttcttcttgtatgcaaccaagtggtggttgtagcatatcattgacttgtaagtgtcctgttggttaagctaccgttcttgttttattcatctgttacagaacttttcaatcatgctccgttaactgcttatggagtacatgatgtaactcactttcaggtgatcaatgccctggcacaagtgcgacagattctactggagcaacctgtgtgcagcaggcagaaaaggtgtctactgacagtgatcaagttgctaaggctgcaatgatgactgctgaaggtgccatgaatttcatgagaagtacgatatctggagacttgggctcctttccaagtaagcattttcttgtttggtgtgatcaaaattcatctactatgtttctgtgcacatcttaaatttttattgcaagagtagtgcaatagcttgttttgtaccttttttcctaatccttgtatcaggttatcatgatttgatgagcttcctttctagttttgaactgtggttaggattagtaggatatgttgtgcttgttttttctacaatccttcatttgtatatttgtatgtaggaacagacgctgcatctggaaaggagagcatgcctatgggcatgaatccaaattttgacaccatgggagcagatagtgatcttgctgttgtcttaaatgcatggtacgcagcggggttttacactggcaggtaattctcgaactttgaccttggattgcaaagttgcttttcccacatctccgtccatatttaccatccaaatctttgttaacacatattctctttttatagttgagaaaaaacatgtggatcgctttgatgtcactctgattgtttggcaactattttcatattttggataacaagagctcatgaagagtcatcttttcttttccttgggcagtacctcctaacaagattgatctgtttagataggtccatgatggcctttttattgattttgacaacatagatataatatatggattaccttcttatgtgcacctattctgtcatttctgtgctaagtcgtgctatcttgctatagaattttgcattcatctgaattctctgattattattgacaggtacctcatgcagcagtccatgaaaaataccagacaaggctgacttctattaaaaagccatttggagtatcgccaaagatgtcctttccactccagaaaaatcaagagatctattgacaactcgtggaactgaacattccattagcatatgtaatgctatcagtgcttttctagcaagagttatggtacaattatacatgaatttgctgtaaggctctgattagacattaaggagaaacgatggtactgatcattttgctatccaaatctatcagatgatctgtagaaacaagcgatccctgtgtgatggttttgctatttgccgcccaaatctgcgttgaaaatgaaatgtacagtttttagactactttctccagggaggcacttgtgcatgtcgatgtcttacatctgcctctcttctgggcagcttccaatctttacaggtgggtcgtggcctcgtgggtgcaggtttaagcggtgtgctaaaacttttgtgcttatgtttttgtctacttatggcgtcttttagcacatagttgctgtgatattatgcttgcagacctgcctctgcctggccacgaattgttatgtggcggtggaggttggccggtcaccgcgctgcacctttcaagtgtgatctgtccatcacttcagcatacacgttgacccagctgctgcatcaagccgaattccattcgattgtccaatagtactcctttgcaataagctcggcttgtgtcattttaacggtcaatcacgctcacaatatgccgttcatgtcattgtcatcatcacagagtgtgccgtctgcctaatgtatccgtacataaaaataacatatccatgcatacttgccgttgttaatttagtactaatgtacacggagaaaactatgttaagacaccagataaaaaaaattataataacgtgttaaaagagggattaggaacgcgaacaacacagagagaggaaagggaagtctttgaaagtctgagaaggaagcaacaactgaccaacacagtaggtggcaccaaagaaaaccgcaactccaaggcaccgtcgacacgaacttcacaagaactccaccgagaggagaggagaggagaggaaacgacgacacctcctccggcgcggcgagacgaatctacgcgtaccgagtaccgacgcggcgaccgcctcgctccgtccctatcctcgccgctccggctgattccgtcgcggaggtatatccaccatctctcgcccctcgcctgcgcgtctcaaccctctctcacatcccgcgctccctcctccgtttccgatctgcagcgcgcgcggccggcgaggagtcctgggagggcgaccgacgcagtcggcctccttccatctcggttcgaatcgaatcgaattgaaggtattcctgattgttagtatcttttgtaaccctcactcccccgcgccgcttgatgaggagttgtggcgtagattggaaatccatccgaagttggattggttttttttttctccaattaaccccatctagtttttcgtcagattttttttttgacgcgtggtgtagtactaataaattatagtagcggtgttttcatagggaaagaaaaaattgggggttcaaccatgccccacgttagttctgcccttggcgcttactgttcaattttgaccttcagagggtagcttttgtactttttacgtcgacttgtgtcgtaatctaagactaacttctcaattgttttttttttttgtgatgattttgttagcctgccagtgaaaatgagtgacaatctgatggacaaggttagcgcctttggcgagcgtctgaagatcactgggtcagaggttagcaagaagatgacggctggcatgtcctccatgagcttcaagatgaaggagatcttccaggggcagactcccgcggacaagattgtggaggaggccacctcagagaatttggacgggcctgattggtcggcaaacctggaaatctgtgacttgatcaacacggagaaagttaacagtgtcgagctgatccgtgggatcaagaagcggatcatgctgaaggatgctagggtccagtacctctccttggttcttcttgagaccattgtgaagaactgtgagaaggccttctcggaggttgctgctgagagggttcttgatgagatggtcaggttgattgatgatcctcagacagtggtaaataacaggaacaaagcccttatgcttattgaggcatggggagagtctggtgatgagcttcggtacttgcctgtctatgaggaaacctacaaggtatatgaatacaatagaccctttctttggctccggcctgttaactaagtcagcaatatagtttattgtattatgctccagtttcactattctaacttgcagcagtgagtttcatttccagtctgtgcctgttcaataaaatattgttcaaaattatatatgctgatccatgatgtgagctagtcattggaccaagcaattaaaatttcgcaacaaatttctcaagaaaggctgctttagcagttagcacaatacattgatctaactattgatatttctctttttgcttcacaactactccctccatctctaaatgtttgacgccgttgacttttttaaacatgtttgaccattcatcttatttaaaatatttaagtaattattaattctttttctatcatttgattcgttgttaaatatacttttatgtatacatatagttttacatatttcacaaaagtttttgaataagacgaatagtcaaacatatttaaaaaagtcatcggcgtcaaacatttagggaaggagggagtaataattatgggttggtgataataatttgtacttgtcaaactttggtgcttgcgagtcagtgataatttgtgatgttcataattgttttaccataagcccttagtttgataatttcgtgcttttaagtaaacactgaacagagcttggtcagcagttccttaaaataatgtgttgaatatttaataataatttaatggtcatttgagtgtccagtttgacagttgtgttaaataactaatacagtagatgtggtgctctcctatttttgtagagcctgaaatcaagaggagtgcggttccctgggcgtgacaatgagagcttggcccccatatttactcctgcgcgttcagtagctgaagctgaagttgatgcaaacttttcccagcagaccttcgaagatgtgcaagtgcatacatatactgctgaagaaacgaaggaagcttttgatgtggctcgtaacagcatagaacttctttcaactgttctttcatcctctcctcagcaggatgctttgcaggtaactggattttatgtaaccttttgccaaaatcaaatactaggattctgtataacttatcattctatttggatggaggaaattttgattacgttgcacacagatattattgtttagatggtctgcatattatggctgcatgaaatctgttttctcatggaagttttgcaattgaaaatacctatgtatttatctatgggaaattatatatatctcattcttaaaacatcaattttgctgcaccctagaaatttactggtcattttatattatttatgcttctgttgttttggctgagactatacggttcaattatatagttcagttctgcaacagatggctttttttaatctaaggtataatgtatggggtctttaacaccttaagaaaactgatttgcttgtttgcttagtatcatttagctgtacatatcaagacaacaaaaagaaaatgttcaaaagatagcctgtattgctttattaagcatgatatgctatttctgataatgatgacatttgttgcacgacgacatgttatcagagcaaacaatacattcagaaagtttgtaccttttatgttgctcaacaacttgtattacatgttgtttaaaagtttcaaatatatatacttgaaaaaaatttaggctgaccgaaagttaatggtggacttgtttaattttattactggttgatactctttctcgcacccaggcataggacaccaaccgataatgcagggaagtgaattacagagtatttgcatccaaaatgtactctttaatgctacctctcattatgtgttgacttgctctgttattatcacaggatgacttgacatccactcttgtgcaacaatgctaccaatctcagcacactatccagagaatgattgagactgctggagacaatgaggccatgctttttgaggccttgagtgtgaatgatgagatccaaaaggtgctgtccaaatatgaacagatgaagaaacccgcagcgtctgagaacgcagaacaacggccggtagtcataccaattgccacagaacatgaagattctgctacggtcggcaatgaagatgccctggtcagaaaaccagctggttctcgagcaaggtcaggtggagatgatgatatccttgatgatctcgatgagatgatatttggcaagaagggaggaagcagttcccaagaagggcccaaaaagcaggatccgaagaaagatgacctaatcagcttttaaataccgttctggccagttcctcgtggaatcagaagatgtttgctgtttcatagtgccgaacgatatctgtattcatccccgtagaagatttcacattcgccaggatttggatcgcttgtttatttgcatacgatctatcatacttgtctgtcacagtttgttcggttgatttaagttgcttcacccttcacatcctctggttgcatgattgcatctgcattggatggctaattatctcttgatggaaaaacacgtccagtataatgaatgagcctcagctcctattcattgctctttgcttttatggttctacctttacaagtttcctattcattgatctgtagttctggctgcaggattcatattatcgtttttctattttactgaagggccgtgagagacagagagagccggtaaccgatttggggtttctcgtccaaagattttacgatttcaaaatattaattttggtgaaagcctgttcacttgtttgtgaaaattctaccaataatgggagagattcatcccaatgccttttcagggtggtaactggtagccgttacctttatcactcaaaagtctcatcggcctttccgctactttggagtagtttttttagaacaaaaaatagaggttgttgacaaatgatgaaccaatactgatatatgtaaatcatgaatccaatacacggtagtcgtattccccaactggcaacaacacgtacaaatgctacattgtacacgtttgttttgatcatatactaaaaagttgccaagtttgccgcagtttctttcgcaaatgtgcgcctggcatcaaattcagcagtatactggctagcaaaaagaataaacttttttttctcagaaaataaatctcgtcacaaatacgaccacaaatcaaccagaacttcactgcattttcagagtaatacatagtagaacgcatgtatagcctagccatcattatccatcattgacatggtcagcacgccgcgagcttggctctgagctctctcctcagtatcttcccagacgccgacttggggatcgcatggatgaagtgcaccttgtgtagcctcttgtagaacaccacctgcagagaaacgcgaaacgacaagctctcgtacgtgaggtctccagcaattttgctgctgttgcgtcgtcaatctcatcccaatcaatacctgcttggatatgaattccttgatggactcctccgtgatgtcggagtcggcggcgcggaccacgaacgcgaccgggacctcgccggcgacgtcatccttttgcctgacattttaacatgcagttattttttttacctcggcgagtaaattctggtggtgtgtgttacgctgttgatggtgaaataatggaggtcttacgggacgacggcggcgtcagcgatggacgggtgagcgatgagcagcgactccagctcggccggcggcacctgcatgaatagacaatagttacagtgcgaattatcagaaaactgatgctaagtgtcctgctgttaattacctggaaccccttgaatttgatgagctccttgacacggtcgacgatgaagacctcgtcgtcgtcgtcgacgtagccgatgtcgccggtgtgcagccacccctcgacgtcgatcgtcgcggcggtcgcctcgggatcgttcaggtaacctgcacgtgttattaattattaccgagacacctcttgtcatcacatgcttgccggcgagctattaacactttactgggggtggtccagtagatacatagtctgtcggttcgttttactgtaggtagatactctctccgtttcatcagattaatgttttgattttagtttaagtttgactaagtttattaaaaaaattagtaatatttttaatctaaaataaatttattataaaatatatttaattattgatttgatgaaactaatttagtattataaatattattatatttatatataaacttggtcaaaatagttaaaacgtctttcgacctcaagcggaggaagtgctaacctttcatgatctgtgggccgcggatgcagatctcgccggggaggttgcggccgagggagaagcccgtgtccgggtcgaccaccttgagctccgcgttccgcaccaccgtcccgcacgacccggacttcgccggcgtcggctccttggcgaacgccgggcacatcgacagcaccggccccgcctccgtcatcccgtatccctgcatcacatcgcatcgcatcagcccgcgtcacgtcttgactcccccgtgagaaggtcgcgagattatggtgatttcttccgccctgatcgcgacgcgcgcgcggcacgcgcggccatgtcatggtactactacgagagttaggtgcagcgaacggctcggatgttgtctccgtactattacgacgttttgccacgtgatggagaaactaatggtaataacttattgtcccttcccaaaatatgctctctgtgttttcgctttgatttttttccagttaaatttaaatttaattaagtttgtagataaatttaacaacatctaaaacatcaaattaatttcattaaatgtaatattgaatatattttgataatatgtttgttttgtgttagaaatttttctataaaaggtttaacaaggaaaaaaaacaaaaacaacttataatacgatgaaacagagtcaatctagatttggatgtaacatattacgtcattcgattttatgttgtactccctccatccatttaagcgcagctataagtttccgtattaaattttgattgtttgtattatttaaatttttttaagaaaaaaataaaaacataagttatacataaagtattttttatgttctatcatctaataacaataaaaaattaatcataaaaaatatcaaataaaacggaggatcaaaattggatacggaaactttgacttagaatggtaagaagggagtaatattttgagaccgatcgataccgacctgtccgaagatggcctgaggcaggcgggcgcggagggcgtcctcgagctccttgccgagcggggcggcgccggagagcacgatgcggatggagctgaggtcgtggcgctccacgaacgggttcttggcgagcgcgagcacgagcggcggcacgacggccgccaccgtcacgcgccaccgctcgatggcccccagcatggcgcccatctcgaacctgggcatcagcgccaccgccgcgccggcgcgcaccgcgcacagcagcacggagttgagcgagaagatgtggaacagcggcagcacgcacagcgccacgtcgccggcacccatgtgcaggttcgggttctcgccgtccacctgctgcgccacgcccgacacgacgctcctgtgcgtcagcaccacgcccttgggcaagcccgtcgtgcccgacgagaacggcagcgccacggggtcgtccggcgagatggccacctccgggacggacccctcgtcggcgtccgcgatcaggtcccagaacggcaggcagccttccggcgtcgcctcgtcgtcgtcgatggtgatcacggtgagcgtgtcgtcgccgacggtgcaggcgtcgatccttgggaacgcctcgtgctgccggagcttgtcgacgtagacggactgggtgaggatgagcttcacgccggaggccttgaactgcttgtggatctcctgcggcgtgcagaacgggttggcggcggtggtgaccgcgccgaggaacgacgcggcgaagaacgccacggcgaactccacgcagttctggagcagcaccatgacgcggtcgccgtggccgacgcccagccggtgcagcgccgcggcggccctgcggcacagcaggcgcgtctcggcgaacgtgtacgtcctccccgtggccgccgcgatgaggcacggcgcgtcggggagctcggccgccctggcgaagcagtactcgtgcaggggcaggtggctggggatgtcgatgtccggaagcttggaccggaacaccgtcaccgcctccggcggcgcctcatcgaccgccgccgccacctgcggctgcgcctccggtgccgccaccgtgatcatggccggaacaaagctaacctagcttcctccggtgcatgcacactctcggattaatgccgacttgctagcgaaccaacagtgcactggtactgcttgctccggcgaggcacgaagagtgggaggaggtggtgggaataaatacagcattagctagcagcaggaggagcgagatgagggagagagagggggttaggtaggggagcaacgcagcagcaggaggaggaagacgagacgagaggcgcacacgcggtcacgtacgtaacactcgctagctcttgcagcccctagctacctaaaaaaaaaaatgtgcccacgtattaatccaagatcgctaccatgccgttattgcacggattgttctgcattagtttctccccctgtttgaggactgaaagaaaatcaagttctccttttggcgttaattcttctcaatttgccaaaaatcaagtagagtataataacatctacttttggcgttaacatcaaattctagtttttttatatataatttacactggcaaaatattacacaattttggcgttaattcttctctttttgggaatattaggtgtcgatgaatgctgatttgttaaaggaatggaattctaatcagggatgtcccctcgtgatcgttctcttgaatattatgcaaatggttataatgaaaatatgagaaaaaaagaaaatgtatattataatgacataaatcactccacccaccacaaatcatgttcaaaatcgatctacacattaaaaaaattcgagcataaatagtatcaatattttatgaaaaattgatttttcttttttaattttggatatatgagttgaatttatagttgagaatttgtaaaatgatatatgtacgtttttgcatgagtgttgtcatttttttttactttctttcatgattatttggattgtatttgagcaaggaaacatgcatcttccgggagattatacaacttgatagtacttgttaaccacaaataattactaaatcatgaaaaatctctttcaaatatcaataacaatagttgcactagttactcgaaatgcatatttaccatcatttatataactcatcagtcttgttttcattgcacaacagtataatactataattgatctaacattgtggatcatacacaacaaaggaattaatcttacacttgcatgaaacacaaggaaaatgtccatatttacatcaatcacagagagatgccatgccactatgccagcccagccgtctcaccagtagtttctgcagctgcatgcgccgcgcttgaagcggtggaaccggttccggtccctgacgacgatctccctcccgaagatctccgagatgagcgcgctgtacgcgtggcactccttgctcatccggaggttggtgacgaccctcaccggcgccccctccggcgtgctgagcaggccgaacgccatggccagcttctggctgtgcgccgcgaccacgcgccgcttctcctcctcgcctgcgtccagcgccagctccgacgtgtcgggcgtgtacccctcgaaccggagctgccactccatctggtgcagcatctcgtagatgtcgtccgcccgcgggtgcgacctgtcctgcgacacgaaccggtgcgtcgcgccgtgcacctcgacggcgctgtacccgggggcctgcgcgaggcccctgtccaccgcctccgtccggcgcgccgcggcggcgtcccggttgtgggccctggcgtgcatgtcggagaggattatgtagtcgccggcgttggtggcgccgaggcgctccagctcctgcagcgcgcgctcggcgagctccaggttgccgtggatgcggcacgcgttgagcaggctccgccacgccgtgtccgtcggccccgtgggcatgctcccgatgagcgcgcgcgcgtcgtccagcctccccgctcgcgccatgaggtccaccatgcagccgtagtgctgcgcgttgggtgtcagcttgtgctccagccgcatccggtcgaagcagcggagcccttcctcgaggaggccggcgcggctgcaggcgttcagcacgccgacgtacacggcggcgtcgggcctgtggccctccctgaccatcgcgtcgaacacctccagcgccttacgcccgtcgccgtgcaatgccaagccggacaccatggcgctgtacgtccacgcgttcttgtcgtccatcgcgtcgaacaccgccgccgcgttctcgatgcagccgcacttggcgtacatgtccaccagggacgtgctcatgaacgtgttcagcctcgcggtgttcctcagcagagcgcaatggatgctccggccgacgtcgtgggcgcccaggtgcgcgcacgccgagagcgcgctgaccatggagctctcgtcgggcctccatcccgcgcgcaccatggcgccgaacgactcgacgcactccgcccagcgtccggccctcgtgtacgccgcgagcagcgcgctccaggaagccgtcgtctgctcatcgtcctccatctgctcgaacgcgcggcgagccaggtcagcctcgccgcacttgccgtagaagctgatgaggctgttctgcgagtgctcgtcacgctgaaacccgagcttcacgaggtgtccctgcaactgcaatcgcaaaaaaaaggagaaaaaaattgaagccccaattcaccggatttcagatcactcgcacggtgctcaggtcagtgtgagctgaaactgtcacctgtctcccttcttgcaaggcgccgagctgggcgcacgccttgaagacgaacgggaacgtgtagctgtcgggctcgacgccgtcatccaccatgtccacgaacagccgcagcgcggccgcggggtcgcggccgccgccgccggcggcggcgacgtagccgcgcatcagggtgttgtagtcgaacgcctcggggtcgtcgagcgccgcgaagatggaggccgcgtaggccatgctcccgggccagtcggcggcgagcgcgcacgccgcgaggagcggccgcgcgtgccgcggcgagcggtcgaggccgagcttgacgtgccgcgcgtgcgccttcctcgcctcgtccaggttcgcgcatggcgcccggtgatccctccccctgaaggccgcctgctccgccgcctgcgcctgcgccggcgacgtcgcggcgatcccgacctggtgctgcgcctgggagagcactaaaccccccaccatgctacatggagcgccggcgttcacaagaatcgtttaccgtgaggagtaaaaatcgcacgtctcgtcgtctcgagcagtcagctagctaggtaagctcgtcgtacgtgctcgttggcggactatgcagacgtggacagtggcgcggagtggggtggtctacgtggaaggattctgtggctgggagggcgcgcggggatttccatgggcggttggatgccatccacatcctggagttggagcgggcaaatggcagcacgccagcatgggccgtgacaaaaatggttgggctcaggataaggtacatacatgtcccacctgggcaggcaccgggtcggcggttggcagttggcactgctctcggtgaagtggaggcggcggatccaaatactacgccactgcttccgccatgggctgaccagtggcagtgaccatcggcggtggttgatggggaaaccgttgatgggatcatgggagtttgtttacccgagaggagttgatttcagacgaatttgctatacatccttcgaattggcccagattatctccttcagtagagctgactgggctaaacgtaaggactgcggctgctcacacacaacacaaggcctccagtccactggtctggcttgagaagcatcagaaatcacaatttaagagaaagtccactttacatccctaaactattggccaatttttagttgcgtcattcaaccgcaaaaccgaatacaaagcatcccctaacttttgtaaaaccagtgaacatcaagtcccctggcagtattgacagtgatttctactgtcatagcttgttgacttaaaatctttgtcccatgcgatgtctacgtgctgtttatgtggccctagaatcaaaaataaaaaaataaaaaaaataaaaaatagaaacaccaatggtgcctccactgccgcctattcccaggtgcccccgtatcttccgtgtcgactccaacaccagcgatcccattgtaatatgctcaagaggctggagagaaggttggagagaagatgggaggagcgagggagagagatggtgacaacacgtttgtctcactgtatttttttttattttccaatgaaaaacacatattgacatatgggtcacattggtgattttctttttgtttctggtgccacgtagacaccacatggatgtcacatggaccaataccaagtcaataaaccacatacgcacttaatttgcactgattttagatattagtaatgctctatgtccatttttacgggtaagagatgtggctggaactcgactgttgataatttacacacaccacttgtaggcatatcactccctcctgtgttttagttttgaagtaagttaaactttcataatttgattaaaattgtaaaattattcactgtctggatcatcaaattagcttaattaaaatccatcataaaatacatgttggtaatgtatttattggcatggtagatgttaattgtttttaataaacttgatttaggacaaacatactgactaggctgccttgacgtaggcccaacaggcaaacgatgcaactaaaatagcttagggtaatacaaagatagaatttgatatagactcttagttcaatgacagagatatacattactgaagactagagctaagataagctcaactaataagattagatttctacaaaatttacatggtgacttaaaaaaaaattaagcatgactttagaggaaggcgtaggcaagccttagcagtcctaggcctgcctccaccctgtcttagttaatacatacggagtaattatcctcatatcctataataattgagacaatgaagtctctcaaccattaatgcacaaaaacaactttgttatctttctttccttttcttcacataatataacaaaattttctctaataaatgctaagggtctattgataggggttcaactcctaaatttaactccagtaattaagtccgtagtgaagtttgtaagttcaagtgccttaatttggtttcggtgattaatgacaaatctaattatatgagactaacgtttttatgagcctttctttgactagtctcatttggatatggaagtaaaaatgatgagaggtatgtattaaacttcacatattctaacttggtctctcttgtggatccaaaatatagtatgagcttcctatttgatctttattgattatgtgcatatgtgttccttcatatccatatgtatgcacatcttgagggggagcttattctatattttgtttattataagatttctatcttgatttgaaatcatttttcatctcatctctctatattgtttatatcgagttattatccatcaccaaagagagaaaagattgtaagatcttggattaaacaatttgtgtaattgttactttggtgatagatgataaaccgatgtttatgggattaacctcttttttgcataagttgtctactaggttatttcccgataatgagatgtggaagacatgcattcttttgtgatggaccttaatcatgacaaggatgaaatgcatggagataaaacgatatgtaccacttcttatctcctactttttgataggttcatatatatgatttccatgttattgatatataagtgtgagactaatgtttactcgaatgttatcttatttagtctcatttacattgagaacatggagatcatgaaggtatatgttttatgttggtctacatcattactacatatgccttctctatatgtataggataaacccccattggtcattctctaattatgcatacacttgcatctcttgtatatttatttgcatgcatatatttagggggagcaaatcctatacatttattgtgcatgttctaaatccatgttgttcacctattatttatatcggatctttgcacttgagcttgcatacgagtatatgacacttgtgatgttaatgaatactcaacaaacatatccatatctttcatatgcaaccggttggtcatcaagtgaaggatgacaaccgatttgttgagactaatgttctcctttgaggtgtgaaaatgaataggtcccactacgatgaggctaatgaatgacaccatgggttagtggtcaccaagccaaggacatcgtcatgttggcaagaatgaagtcaagcttgtgatgagaataaagtcttgacaaaggatggacaagacctcggcataaacatggttcaaccggatggtcacaagtgttgatctcggctcaagcttgaccccaagatggatggcgcaaggcaaaggtataatgtagctaagaatgttttcttagtcttttcccggtcttggtgtttggtgtagaccggatttgctagataggcgtcgtactatcaagaggggtctatgaagcgagcttgtggatgatcttgtgccatattagttcatatgcatgtaggtgcattttgtgggcttgtctaaccaagtgtgatgagttttctcaagtcctaaaccaagagagaagtgggcatgtccaataggagtgagtgacatcttgtgggtatgtccggtggatatcctttggagtgtgagccatttatccttgacttaagttgtgtttcttggatggatttttcatgggttgaatggcactttgaataagctttccatagagtcgaagaacgccaaattccaagacccgagtcaagagatatcgccgttttactaacggtcggttgagctgaaaagtgacctgcggtctgaccgtgggccttaggccggtctgaccgggtctgttagccggtttgactggcgtggtaaggccggtctgaccggccccactggtctattgcactggtctggtttttggtgacgatacagagccgccagagccacaaccggtcagaccgagccgacggcggtctgactgagccatggacggtctgaccggccactacactacggtcagaccgaccaggttgagtgggctcaatgattgccctgtaacggctagaaaaactagccgttacaaagtagtccggtctgaccggcctcacaatggcggtctgaccggcagagcacaaagttggggatttcggttccaacggctaattttggtggttgggggtatatatacccactccccagcagcaaagggaaaggttttggcactccattgcattatcttgaacccttgcaagagctcttacacccttgtgcacttagtttatctagtgaggtgttagagagtgagttaagccaatccaagtgcattgcttcatttttatagctagtgtggcacttgatcatcctcggcaagaatcctagacttgttactcttggaggttgctgcctcctagacggcttgtggaggtgttgcccggtgacctctccgaggagattatggaggaggcccggcaccgtttgtgagtggtttagagttcaccacattcggagtgaaggaagaactaccccgagtgatcgaggcttgggtagtcctctccgtgggccggctcccaccttgcccaccccttgacgaagggggcgtgcggtggcttcgtggttgagcggtggagttgggctcgcctcaacggggattaggaaaccggcgagtttccgaacctcggtgaaaaattccttgtctcttgtctcatttatttgttgcatttacatttgtgctatttacattcatagagacatatttgagcccatatcacttaggtttgtaaaacttaacttagttgcttagttaaccttgcacctcaccttgcctagcaacttaggttagttttgtttaagtgccattaagttttaaaaccgcctattcaccccttctagtcggcctccttgatcctacaaagttgtagagaagcataaacccaaatccacctctctagttcattttgtgagaacacttcagcctacccccactcccttgtttgagtagagctgaaatcatttggttgagctctaactccacataagaggtggagctgaagttggaattagagttgtgccctaatagggcctaagagtcaactataagttgttttacatagtaactatgttttctttccacctacccctctctttcacgtcgccaaatttacttgcattgtatatgtccttatgatatggaatgtagcagtataaatgaagataccacgaggattcattatccaaatagcgacgctccaattcctctgcaagaaattttcttaagaaactttgcaaaatatactaagggcttgtttggggagcttaagattatgagaaactactgattggtagttagtttctgacttttagtttattttatagactatataactataacttattaggacttgtaaaaaaactaaactgtttgagatagcttctgatttcgggagaaattatagctgctaaaagctttctaaacatgccctagaatgaggagctaaatctgagattggttatctaaacagtgatgctctagtttatttgcaaaaagatattttttttgagaaactttgcaacaaataataataaaaaaaccagagcgaaatctctagagaggccacgtcttccgtggcaagaaaaagcgagtaataataacgcaagcaagttcatcttgggccgcaaggcgaactgcatagccgccgtccgtccgtccgataaccggttccccacacaaatacgctcgtttcccccacccaccgcttctcctggtcgatgcgccggccgccttaagccttaaaccctactctcccacaaacccccccacccaaagccgccatggctgccgccgccgcgaaggccgcggccgccgccctctccaccgccggtgtcgtcgccttctcctccgagcgggcgtacgccgatgggggcgcccccgcgttccgattccccggcttctccgcccccccgacccctccccccgccgcgcagccgccgccgccgacgccgccggctcccgcgccggccgcggaggagaagcgcaaggtccggaacgatcacccccgcaccagcgccgccgggttcgaccccgaggcgctggagcgcggggccgctatgctgaagcagatcgagaactcgccgcatggcaaaaaggtagggggattccgggctccaccgctctggttgggtgtttcttggcctgcattcttacggggggttctcgacccgtggccgcgcaggtcttcgagatattgaagcagcaggaggatgtgcggagggcggagaacctgacgaagaaggtggagtttcagaaggagcttgcggcgatcgaactggtgagatatttctcggcctatctttttttttctgtgctcttactttcttagtcatggtgagctgatgatttgaacgaattggaattggttccagtcataaaccattgcaacaagtaaaagagaagaaagcggaacgttttgagacatttaggattatgaaggaacactttgtaggatcagtaatatttttgcgattgaacgtcacagctataatattttgtgttcttatggtaataattttttattcagttctgaccgacattcagtttgacttatatgacttccatatggtgtttattggtgatatttatgtctagctaatctaattagctgccaaagccatttccttgatcatttagccctgtacacattcagggtgtcatcaccagggcaattctgtatgcgaattcacaagttaggacatacttttgttatttaccataaggaattttgcaggagaagacacgcgttgattatgatgagaggaaaaaacttgagcaacagcgagctcaggtaaaatcacagatgtctcgatacgaagatgagctagcaaggaagagaatgcaggcagatcatgaggcccagagagtgagaaaccaggagctcgtgaagatgcaagaggaatcagcgattaggcaagagcagatgagacgtgcgatcgaggagcaaatacaggaagaacgaagaaagactgatagagcaaaggcaattgtggagaaggaaattgagcaagagaaaattttagctgaggcaaatgcgagaataaagttaaaaaaacaaactgaagatgttgaaaggcgattgcttattgagggggcaaaggctgagaaggagaagtgggttcaattaataaatacaacctttgagcatataggaggtatgccagataaatagctacaaaattgtgaatttattggacttcttttctgtagtattataagatattttcataagttttgtataataaatatatttttaagaatttgggaacactcttagaagagatggcttttcattttgtatgcctctactaggaaactagttcctagtttaatatttttttcctttatattttgggatggagggagtactaaagtagactattttaattttatttagtactccatctttcccacgtaaggcgagcatgcattttaagattcaactcttgaaatatttgatcaacaattaatctaatataaattcaattttatttgatgaagataatatcattggactgacatttgaattttactttcccatggttatgattttgttgctacaaacattatagtatataagaaattaaaagttaaaggttggatacacgtgccaagtttgaccgcgtgtccacgccttatactgtgggacagagggtgctgagtggaacggtctttgtgtgctcttgttatgacacaactgttttaatatataaaagtttgagtgtcctgtaatacttttcttctacatgtttcaggtggtctacagacaatattaactgatcaaaataagctagttgtagcagttggaggtgtcacagcacttgcagctgggatatacacaacaaggtaaatttcataagccataccgctgtatatgtctcagattcaagaacacttctttcataagtacccatgaagagagtggcacaaattaattgtccttggcaagcttattgtaccttctttttttcttttgcgcccactttcaactttcaagattaatttccatgaaacttattctaaagattgcacaaagcaaccaattgctctacctatcattcattcactgcccattatttcatctaccttgagattgttgctttcctttggaatgcatctgaatttatgtttttgccattcatttgctcactttatattcttatatagattggtgtattttattccagggagggtgcaagagtggtctggggctatgttgatcgtattctaggtcagccatcacttattagagagtcatcacgagggaaatatccctggtctggtgtcttctcacgtgctatgagtacaatgactagtaaactgaataaaggaagcaacttggggaacaacgggaatgggtttggtgatgttattctaaatccttctcttcagaagagagtgaagcagcttgctaatgccactgccaacacaaaacttcatcaagctccttttagaaacatgcttttctatggtccacctggcacaggaaaaacgatggcagcaagagaactagctcggaaatctgtacgttatacttgacaagtctctgtgaacactaatgacaatgtttcgaatattattagctcactaacattatggacatctacagggattagattatgcactaatgactggtggagatgttgcaccattgggatcgcaagcagtcactaagattcatcagttgtttgactgggcaaagaaatcaaatagaggtttactcctcttcattgatgaagctgatgctttcttgtgcgagtaagtgataatctaatcttcagtctgctcttgtttgaaaatatggatttgcagcatctgaaaatttcagaaaggatttgaatctctatttagatactaaagtagtaaagtttaatgaatgatataaatgatttgcaatcaatcaatcactgaacttgatgtaaggacttgccattccatttgttacatgctttagaatttgccacttgatgcctcagtgacacatggtacttgtgagcgaggtaataagttgactgagtggcaaatcctcagtttccacattcatctatttcagtttcttttgcctgtgtggtgcttgcttttgtcagtacgaaattttcatgccattgttaagctgaaaatggccagtaaagttggggcccaaaattgaccagttgtgcagaagtaactgtatattctgagcaaaaaagtagctctttctcttgcatatgtttatcctaattttcacaagttcacctggaaaacgttgggttagcaaaggaatgtgaatatgtgatcacctttggataagagcactcatcttcgcaattaggtaatgctgtgcagagttctgctttctagctctttaaaattgtaactctaatttcttcccacgttgacattacagggtgtgtattcgtatattttcaattggtttccttaaatgggaatttgttatagtcaaagaatagtattaacatttcagagtaatatcttctatcttgcagacggaacaagacatatatgagtgaagctcaaaggagtgccctgaatgctctccttttccgcacaggcgaccaatctaaggacatcgtccttgcacttgcgaccaacaggcccggtgaccttgactctgctgtcgccgaccgaatcgatgaggtccttgagtttcccttgcctggggaagatgagcggtccaagcttttcaaactatatctggacaagtacataatgaaagctggtgaaaaacacgaaaagagctggctcaggttcttccgcggtcagcctcagaagatagaggtgaagggtgtcacagatgacttgatacgggaggcggctgccaagaccgagggtttctcaggaagagagatcgcgaagctgatggcaagtgttcaggctgccgtgtacggaagcaaggagtgcgtgctgactccagacctgttccgtgaggttgtagactacaaggtcgccgagcaccagcagaggagacgacttgctggctatgagcagaagaatgcttaggaagtctcttttcgcgcaaccccccccccctcccccctcttttgctgtaggctcacaatgtttatttcttgcgaggttgcctgaacggccaggtgatttatctgcttcgttgtctttagctttattattcttttgctgcaatccttacccttacatggggagtttttggcaatggtggatgatcaacagaagaagaggattacatgtatgaacgataacctaacgcagtgtcacttgcgacaagatgggaaatttactggacaatatcattgatcagctctaatttcgcatacatattcccctctgttgatctttattttttaaaaataaataaataaataaacgtcatagactcgaagtcattgatcgccgctgtggtcttctgaatgatccaaaagctttcagtgatatgtggtgttgatattgatctgctggtctacgtcgaaatgatactgatctgttagtctacgtcgaaacaccgtatataccgtgatgtgtgactggatgaagtgttgtgtactcgtttggtcgtcaccattgccccggcatagcgtgcacggcgcccagctccaccgcatttttcttccgcgttcttcattgcggcgagctcgactgctcgagctttcaaccatgagtgttagagtggggccctgcattctgcgaggaatttattcgattctatcctcccacaaacagcatgaattcctctcttaacaccataggctattcagccattgcatcgatttattcaactaataacatgagcacgaattgcaagctcaaaaggatccagctgcaatttctgcccagtatgatgactgtactttggagtagaaaatttgaagagtagcataaacagacagggaaagcaagattaccaccaatgagtagcagttacacaaaaccaaatccagcatatcagtgattctgtgataaatttattgtattcaacaaatgcgacggatgtagtacacattgcctttacccgtatttgtagaaacatttcacaccaacatctgttgttacagttccaaattcagacctaacattgctgtattcatctcgtggcatttgacgaagtggagtaatacatgtaagcagtaatgcacaagcacaacaacatgaggcaaaatagagttgtactagcaacatctaatttactgaagctcattcggcaggacgcaggctctcaggcacgtcacattcatcaagcagagctaggatgttattctcaggggcacttacagagggtaatatggcgcgcttcggtactgcggatcgcgaccttgctccgctgctgtcggactcaagctgcgatccttccttcacgactggcaggtctgtcatcaccctcacacccgctgtagcgatcctttctttccatatcctcccatcctagtatccatcaatcgatgcatcaagtaagggaatatagctaggtaagtagacactggaggaaacagggaacctgtaagagaaggcatgttgttgcaattgtagcactggattttcctctacataagttgaataaaatgcatggttctcttgtgtgtaggtgaaatgaattttctcttgtgtgtcttgctccttatagtggattacataacacaaaccaacaacacaattcttccacaaacagcgactgaatggcttacatgaagtatagatggttcaggaagtggacatttcacaggttgatcaaggttgacaggctccactgggtgctccaccggcttgaactcgacgccgacctcaatgccatgcggactatctgcaggaacagcttgtgaatcaggctctccgctgttcatgttgggtgccaacgtctccacaacctcctgtatcaccaaaatggaaacccccaaatcagtaactatttatcttttcctttgataactaaagtcggtaactatttcggttcccacaattgctggttgattgcaggggtgggccacgtaatattgttagctctgtgcaaatttgtcaggaactgcatctaattcaaagaattgtcaaatcgagagaatttctcataaacaacaaaagctcccaactttctccaattttctggcagcaaccaagctgtctgttcttggttgactaatccaaagaaagcacccaacagttattagtacatactatactatttcacttgaatccaaccaaacaaagatcatctaaaagcaaccatcctcgctgaaacaatcctaattcgagacatcataagagtaaaagaaagcaactaccctgcgctggagaaagcacaatctacccatgataagcgaataagagatcaaatcgaatcagccccaatcgaagggacctcgctgagctaccaataacctagtcttcagctatagccatcgacatctagatccctccttggggaattaaaactacccaaaaaaaacacacacacacaaatgggcctaatataataggaagacccaagtggcgcagacggggagagagagagctcacgacggcgctcttggcgcggcggtgtgcgccggcggagaacctggagaagattccaaccatcgtcccccgctcttgctccgtacctcgccggagctcaagctgggagctcccttttctctcgctatggggggcaggcagctactgatgatcgagaagaagaggaaggagacgaagaaaagaaaagaaaaccgtcgaaagttaatgagaaaaaagacgcaagggtgtccggtcccacccgccagtgaataaaagtgtggaccccacatgtcagtgactcattaaccagaatattagtatttgtgtttttttcttttttaaaaaaacttgaactagacgcgacctgggttgagtgagattagtactactagtactagtcggttggtcggtcagtccaccccgcgacaccaaccgatttcgcagcgccagcccactgattcctcaccgaattttttcattttttttctctctttccattctccccggcgatcgagtagccggcttctgctcgccgcccgcgcgccggagggaggcgaggtccaaagccggcgaggcgccatgcaccacgaccccaaccccttcgacgagggcgccgacgataaccccttctccgtaagcagctactactacctaaccagctctctctctctctctcctttggtgctctctgagatctcgggccggatctctccgcttggttggtgtggtgtggtgtttttgtggcggatgctaatggggtgtgggtgtggtgtagaatggaggaggtggtggagcacgtcgtggtggtggtggcggcggtggtggtggcggtggcggaggcaagtctcagttctcgttcgggttcggcggcctcggcggcggcagcaagggcggtgccactgtcgacatccccctcgacaacatgagcgtaagagaggctaacccaagtgtctcgtgatgtcgtctgcttttaggatcacccactacttctgcagtggtgcttagcgagtggctgatctggaacttctttttaaattatttttgttcttcaatgaaggattcgaagggcaaggggaaggagctgttgcaatgggaggcagatctcaagagacgagaggcggtacgtggatcatgctgttgcctttgatccttggtgttggtttagtattaaatgacgatgctaaattgttagctgtgtttctgttttcttggattttttttttgtgttggtgtaggatatcaggagaagggaggaagctctcaagagtggtaagcttctaagtgcattggatttggtcctgtgattttcttctattctgttattgctgaacctttcaactgaatgttgtgcgttcacgaaaaactgaatgttgcacactgtaccgcgttgatgacttgatgtagccggggtgcccatggaggagaagaactggccaccattcttcccaattatccaccacgacattgccaacgagatacctgccaatgcacagaagttgcagtaccttgcatttgcaagctggcttggtacagcaaatcatcttttgatgataactatccctaatgcagggtgttcctatatactgttttcaagaggaccgcgctattcatacttatggagaatgtttgtgtcattgtaatttacagggattgtactttgtctcttctggaattttattgctgtcattgtctgttggatcagaggaggaggtgagctaagcacttctttctcgctagttttgcattccctgtacaatgcccatgcaggcatgcacctgcacatgtgtattgtacaatttacttgaatagctgtttagatacctaaaacgtgcttttattgcacttttatggtttttactgcagtctgctccaggtcactaaattttgtactttcttgtgcagattccaagctctttttcctggctactatctacggtatgcttggaatgcctctgtcatacttgatgtggtataggcctctgtaccgcgcaatgaggtatgcctccaacagttaatgtttcatactatcaacacagaacaatctactgtcatttgcttctcgcaatttgttaacgaagggattccagtgttccacttcctgtcagcctaactatactgaaaacactaacatgcacatcattgttaataaaccgcagaaaatattcatatgttcataaagatgtaaaataggcaatcatgaattcaatggtgtttaacatcaactgaactgcaagtacctatatgtttactactagcattgcttttatttttaatattctgtcaatatgttgaacagaactgatagcgcattcagctttggatggtttttcctttgctacatggtatggccttgatcaacttgcatgtaaatgcttttttgggttgcaaatcctgaatgaattatttcatgtctttgttttggtgtagcttcacattgccttctgtgtatttgctgccatcgctccaccagttatatttcgtggaaaatcattaacgtaagctactattgagagctttcaatatgatgaacctctgctatttcaacaagatttgtgctttagtttatctgatccgatgctaatataaatatgttttgtttgacaccagtggtatattggctgcaattgacaccttctctgatcatgcaatagtcggggtgagtagttttgtagattctgttttggatcttctgtacctggcatatattgaataagcaactaggcatgttttatgctaacacttctctactcacatagtctacaaatatttcattgcgactttgcaaaggtccgctattgagtatatgtatgtgattttgatataaacttctgttatttcagatcttttactttgtcggatttgccttgttttgcttggagacacttgtgagcatttgggttcttcaggtttgtgactcagtctgctttatcatgatgtcccttccctcctacggagtattagtttgcattttgtttgtcaagcctcttggtgttagcacaaccctttcaggcatgtctggatattatatctgaatggatgatgagtactccctcggtcccctaatataagggattttgacattttgcttgtactgtttgaccactcgtcttattcaaaaaatttgtgcaaatataaaaaacgaaaagttgtgcttaaagtactttgaataataaagtaagtcacaaataaaataaataataatttcaaatttttttgaataagacgaatggtcaaacagtgcaagtaaaacgtcaaaatcccttatattaagggacggagggagtaaatagttatttttgactcatggagtacattcattatggattaaatattttgagtttggacatgcgtatatcgagataaatacagttagttatggaacaatgattatatttattcacataattttgttaatttcttatatatgttagtgcacttctctaattagaagctttttgtacttactattattttcattggtttggctttctatctgttcatttctatgcatgactttcaacaaaagtgaagtttcttgcatttaataaagtaggatttttttttatttacttgtgattgtagctttatggataaaagcacatgatgtagatcagctagccaatcttttgtggctgcgatgtccatttgtctcacagtaaaaaaaaaacaaaaaaacaaaagattgaaggcgcatatcacattctcacattaatatcaatcccttgtaattggtgttatacacctttacctttttaacgttatgtatcatttctcatcatgcattatgccaatgccaacttttgatcctctgattttggtgcatgcagaaagtatacatgtatttcagagggcacaagtgaagtgggccgtggaagaaatattacaaaagcccaccaaatactatctgattgagctgcagttctgtgcatacatatatgtacatgtcgatcttgtatgttatgtagtgatggagatgttctaagtacatgtcaatctatagtgttattttttttaacaggaatactattttatagtgttgttttctgggctgatcggtctgttgtgttgaacctcaattctttacctatacaaattgcactttgttcactcttttgtttgatagttcaattttacggttgattggtctgttggcctacgacaagagccatgctcgttggaaccagaagacagcaacccatctgtctggggatctcatttgtgctttgagacttggaaggaatcttgcactccttggagattcagcttccgccgaacttgggatcaggtgcagtcccaactacaactgctgaacttgggatcaggtgcagtcccaactacaactgcacgttagggactgcacaagatcttgtccattcaatttttcagtggaagatctagattaaatgctacaataaccttgttataataattttgtgctagattgtttgaatgaacagtgtccattaaatttgggctttggatttgcatcccacagccgtagcatgactgtctaagttgcagtcatactggactgcacaggaaccaaattcgtactcttgtgctcaccaatgtttatgtatttttttaacagcaaatacagaaccaaatgaggctgtttatcatatttttcccaggtaataatgttctggtttggcacggtttgtattataagcattgatacaacttgagttgagaatacatgccagaaaatcggcaaacaaataatatacggcacaaacctgacattatatatcatcaatgcataattgattatatcatacggctgaccattaacttgcaagataaaattgcactggaaagtggaaacaaatcgaatttcttcagtttcgtggccgtgggatgttgggcgttggcagccccccagcatatgctttggagatgtcctgcgagtctcggccatctagacatctagtgacatggatgctgacttgtcttggccacacagtgacgcggctgctgatgaagtgatgaggtgctcacctgctgccacgagattacgcgtggactgcgttggtgggctagatgtacatatatggtgcacagcaaacagcaaggttgaagggagcagcatcagcgatatccagcctccagtttccagcctccattccctcatcctcagccagccatccctgcgctgccacgtggcataaccatatctaaattcatgaaaccaccaccaagctttctcccgagcatccctggccatcacaaattcaagcatcgattaatcggcagcacaggaacaagtgcatgtattctccgggacataaaaatgcaggacgtgtaaaataaatctcaaagtacgtccttctcttcgtatcttggcagctagcagacaagcaaaaaagcactgcaactttcagcacataatacttatataaattcagaaattaagtgagaaatgttagaaacatcaccagaaaggatgattgtaagagagccaaaaagcttttcttaacaataaaattcagtgtccatagggagaatgctgacaaaatatgattatttgaaattgaagaactcattttcagttcactataagctgcccttgatatcatcagaaaagaaaggaaaataaggggtaccacatcatcatcatcctctctcctccttatgttctcctagctctatcccctcaattctttcaacctcctctctcttctcatcaagcctcaatcaaaaggcttgaagggaagaagagcaactccagcaggtagaaaggccagaagcaaagatggcgatctccagcctacatgccaccacctccctgcactccccatgcaccaccaacacaagcttcaggcagaatcaggtcatcttcttcaccaccagaagcaacaggaggggtagcacaaggtacggaggagcaagaacctttcaggtttcatgctcagtcgacaagccagtggtgattggccttgcagcagactcaggatgcgggaagagcacctttatgcgccggctcaccagtgtgtttggtggtgctgcagagccacccaagggtggcaacccagactcaaacacactcatcagtgacacgacaacggtgatatgcctcgatgactaccattccttggacaggactggcaggaaggagaaaggtgtgactgccctggaccctagggcaaacgattttgatctcatgtatgagcaggtgaaggcaatcaaagaaggcaaggcaattgagaagccaatctacaaccatgttactggtctcctagacccaccggagcttatccagccccccaagatttttgtcattgagggcttacatcccatgtgagtttacattttatcccatgctccacatgattcttccttctgctgtagtatttggtgtttattcttttgtttcttcatcacatttgattacattctgggtaaatcgctctcataatctcagtccaaattatgttatatatcttaaaaaatatttcaagtacctgatttttcaggaggtaaaaatacttcccgagtaaaactaacatgatcattttgcaagtctaacacaagcagattgtttttccaatttcttgtcattacttattagtttacttatacttttaaaccaggtttgatgaacgtgtgagggacctcctagatttcagcatctacctggacatcagtgacgaggttaaatttgcatggaaaattcaggtctgtccaacagtaaggttaatgtatttcttcttccacatgagccatggaacagcagattttgctaaaataaacttgcacttatgcagagggatatggcagagcgcggtcacagccttgaaagcatcaaggctagtatcgaagccaggaaaccagattttgatgccttcattggtactgctttttactaactaaaatttcaaagctacaattataattcagtaaaaaaaagaagaagctatatttgaatagataaaagatatgcaaggcataccacatcaaatcaccaacaattgaaactcaataaaacaagacatgtcaatgcttaccatttgttatgacagatccccagaagcaatatgctgatgcagtgattgaagttctgccaacccagcttattcctgatgacaatgaaggaaaggtgctacgtgttaaattgatcatgaaagaaggtgtaaagaacttcaacccagtttacctcttcgacgaaggatcaagcatcacctgggtcccttgtggaagaaaactcacatgttcttatcctggcatcaaatttgcctatggcccagacacttactttgggcatgaggtaatttaaatggtttatttgtccctttttgccatgtccgcagcaaaccaaccactgtcacttggatattaaaatgacagcaagatagcgagcagtctgaactccgaagtatgaacaaatactccaaaacaactatagatcaacaattcacttcgtacacaaatcataattgtcaatcagctttcctctcccagagctgtatatgcttactggtttgttgatgtcttcaggtatcagtgctggagatggatggccaatttgacagactagatgagcttatctatgttgagagccatttaagcaacctctcaaccaaattttatggagaggtgacacagcaaatgctaaagcatgcagacttccccggcagcaacaatggaacaggtctcttccaaactatcgtaggactgaagattagagatctctatgagcagattattgctgagagggccggtgcacctactgaagcggcaaaagtttaatgagctccacattcatatttcgtgaatctcttcatcaccataccatatcaatgacaatgggcatcctcgcatttcttgtaactagttttggaaatattacagctagaagaaagtaggatggtcattgcataacttgtgaaaccatgcaatggaacttctaaaaatccctctccatgagggtgctcctacatctcttcttgacacatttcaatgtacatcttctatatttcaatgtagaaagaaatacggttgctttctactataaaaaataggtccttcctttagtgcctctcttgttggctattgcttctggtcataagtcaacaacatatgatcgacaagggaagaaaatacagacggaatatttatagatgaattgggagtaaaatttatgagtggtagtccaatgagtgcctaaccaatctcactctattgtgtggatctgcagtgagaataatgcaattcagtgaatcatattcgttcaccaattaatggagtcatgggatcatcatggttatatgcagctatactttaaacagaagttatatacggtgcacatgatagtttcagataaataacaaacagacaaccatgaaaggaactccagatttcagaacagaaactcataggcttgcatatgtgaatttcaaaagcacattgcataaacatggagtctaagaattgcataaataatatgatgctgagcatgaatatgagacagtgcatgttatgcaagcctaaaagagaagcctacaaactcatacaaaacattggtgatcagcatgtaccggcctaccaggtggtaccaccggaagtcatgacgacaattacaatctgtacttggtgtttccatatgatacaaaaatgtgacttactatgacatgtgttggctgaaagggaattgctagaaaaacactcattatgttggcacaacatgctacggaagtaaaatatccacagtaatagatttacagcaaaacaactgatcatagataaggtttcttcacttgtctcactagttaccatgcatcatcaaaagagaagacgtggataaatccatatctgtgaaggccatggcaagtggttcattgcttgaatggacaatggtccaagcccttgaccaccgagaggcacctcacgcccaggccgccatgcataccagtcacggcacccaggagcagcaatgtaaattcggttcgcctccacgccacagttctccacgtctacacaagcagctgtactcctcccggcgcagtccacaaacaagctgtaagccccaatgttgtccacctcttcccacctcatcttcaccatgtcaagtgcatagacgccaaccttcttcacactcaccaatgtctcaaacatatggcccaatttcggccccatcatgaagagcaccaggagcaatcgatcaccggcggcgaccagatgcgggccgaagtgccaccggtcgaacgtgctgacctcagggaggccggcggcgtgcaacatttgggcggatttgttcggagggttggcatcgaggtggaactccagcagctgcgcgcgatcggtcaagccgaggacgcgcccgcggaattcgaggatggatcgaacgaaggaggcggcacgggggaggctgtgcttggtccaatcgaggcgagggttgtggcccgcgtcgcccacggggagggagaagaaggcgtgcttggaatggaagaggaggaggcggcgggatggcgcgagggcggcgtagtgataggcgaagtgcggggaagggagcggcagcgcgtggcgcgtggcgccggtgagcgcgtcgacgaggtggaggccgtggaaggggtcgcggcggcggaggaggacgaggtggccgcgggaggaggagaggagggtggcgtcgcccgggacggggtaggaggagaggagcgccgcgacgacgagctgggagaaagggacgacgcgataggtggggcagaggaggaggagcggcgggatgcgggggcggacgaggtcggcggcggagtcccggagcaggcggcgccagggctggcacgcggcggcgaaggcgtagacggagcggaggcaggggaggaggccccgtagcacctccgagagcggcagctccggcaggttggcccagtcgcggaactccggcgaaggatccatcaccgcaccgccgccggtgggggaggcgcaaatcatcggagttctcgtggggcgcgccgccggcgaggccttttctccccttcctgcagacgaggaccgtggccggtaaatgggccgggccgttgacgccgccactttaggaataaggtcaccggaggtccctcaacttaacagctagatttttatagatcccttaactacaaaaccagaaatgtgtacccctaaactctcttaaaccgttcaccgaaggtccctcggaagtttttttgcccggttttgctgacatggcatcctagtcagcaaaaaaaaattaaaaaattgcgtggggcccacatgtcagttgcacatcttttttttctctcttttgttcttctcctcttctctcttctctcttcagcgagcgcagcagccataggcggagcggtgtgatggggttctcctccatggaggcgacgagcacggccgcggctgtgacggcaggttcccagacccgaagccagtgcgttcagctggagcagcggctgctacaccaacgctgcattctccgccacgcgctcctcgccgccgcccaaatgctgctgctgcgcctgcgtcgccgctaggctcaccgtcagcttctccttgatcgctcccatcaataaaaatgtggacatcattattgattgctaggagcactatgtgcttgcagacggcgaacgacacgacggcaccggcgaagcctgccggggccgggccacagctgaagctgctggtggacaagcactcgcgtaggcgcgcaaggacgcggtggacttcctcatcagcctcctccgcgttcgtctcgtttgtcgaggccgacgccgacgtctcgctagaggagttcggtgactcgctgtgcccgccgatcccttgcaccggcgaactcttgaccctgccggatagcaacttcgccgtcgtcaccgaccggccactactctacgtgcaggtacgtacgtcgtcataaaacttgaataaactttgcaaattttgcaccatttgtattgtacgtgatttacgtgttcatgatgccatgcatgtaggtgacgaggctgaggtgtggcggcttcgtgttgcatcataggtgacgagactgaggtgtggcggcttcgtgttcagcacccagatttgccacaacctcgtcgacgcggcggggatcacgcagttcttgcaggccgtcggtgagctcgcggaaggcgcggagcgtccggccggtgtgagcgagggagcccctcgacgcgcgccacccgcggcgtccggtgtacgaccaccccgagtacgagctggcgtccgacgaggccagcgacaagctccgtccaggcgacgagctcgtgcaccgcaggttcctcttcggccctgacgacgtcgccgcgttgcgcgaccagctccccacacgcctcggccccggtgctcacgtttccttctcctcgagtccccgggcccagaccgccgctttccgccgcctacagccgccgacaccgcccttccgcctgctccggccgcgcgccgccgcccgctgccgctcgcctgccgctgcagccgcgctctcccactgaccgccgcccctctacctgctccagccgcactcacccgctacttgccgcggcggcgtcggtaaccgctggctccgggtctgggaacctgccatcgccaccgcggctgtgctcatcgcctccacggaggagaaccccgtcacgccgctccacctgtgtctgccgcgcttgctgaagagagaatcagagaagagagtacagaaggagaagaaaagaaaagggaaaaaaagtgcagctgacatgtgggccccacgtaattttttatatttttttctgactaggatgtcacgtcagcaaaaccaggcaaaaatactgccaagggaccttcggtgaatggtttgagagagtttaggagtacacatttctggttttctagttaagggaccttagaaaatctcgctgttgacctccggtgaccttattctgccacttttggatgcccgtatgtgggcctcacaacctcagctcaaaggcccaagagccatttagtttacctccgattgggctgaatctgtaagcctaaccaaacaaaatcaatcgtactaaaacttccgaggttctgtttacggagaaacacagctgactggtaatcagtttctggaaatttagaaaatttgggttttaaatttttagctttagtttattttctgtattctataactacatatttttagactctgaagaaaatatagactgtttgaaaaatgagagattttagcagatacagcagctaaaagtttagctccctgaagcttcatcggccactgcaatcttgagaactgaaagcatcggcgattgcatccgcgtggaggttttgacttgtgctttcccttcccgagtcaacaattttataagatcagtcactagcatcaaggagctgggattaaggggagttaaacacaagcaaaggtgatctacgctgtcctgttcctgattaaaaccacggtgatgatctgtttcatgcttccttcacgtgtactcgcacgcctccccaagctctcgctccatcgatcggccatcacgaggcactggctttcaattgatcatgtcttgatcactcgcgatcagtacaagtacgagttcttgcaaattatacaaggacgtacgcgtcggattccttgggtttcccacagcaaaaacaactagtttcggactttgtagaacacctgcaagggctagtgtgatgaagcatatatatgaagttgtaaaaaagttcagcacgagttatgtactgcagcagtgcagctgatggtgtttcagtacattattggagattcagatatcagcatggtgtactggagtactacaaggaccaaatgagtcgtgtattcccaaatcccaactcatgactgtcagtgtagataatttcatacttcctacctactaacaagataatctagatattattcaatacatgtataatactactagagttcaattaaattatgcctgatgcttagctagctaactagctagatatatctaataggactaaactaaataaactacagttgcgcctaatctagctatagctacctattgcatattaacgctgaagatctgaactagtactataaagtttagaaaatatgggggtgatggatcgaccatattcttacagtcctctaggagtctagtagcaggtaagacttttcatagttagttaactatgcataacaaattaaattgcaactgcatgtctttaaatattagctaacttggattggggctaatcagattcaaagtttggatccagctcctcaagtattatctccgaatgaaggcagatatatttatttgtatttttaactccctcgatcagtgtcatgatcagagggcgcgggagcatcttagtgtgagctcactaattaatcttgttttggtgaagtgattaattaacaaatctatggacgatgatataagcatatttggacggacctgtaactaaccctaagataatcccgtgattagctgctatggcgtcttgttggaaggataagcatgcaggtcaggtggcagtgtgaaaatagtttcagtttgcattcatatccttctgcgccaatagctgccggaaatagcaatggttgtctctgtatttttttgtacgctagcacaaagaaacattactattctactaattaaaaaattaagatgcttgcatgtgaaggcttgatcagcttaaagcaactatcagctacacgtatgctgaaatttcaagatcagattaaggtctcaattaactctgatcacgtgatgcaagcactggagcaaatccagttctctggcctagcttgtacatatatggcattactttgatgactctgacgacattcctgaagtcattagtgtgtcatccaaaaggccaaaacttttgaagtagcaactggtcttggttattgatcccaaatttaacctttgcaacatggtcaaaacgtaaatctcactggttaatatcgtatagttaagtgcactgttctagcttaggccagcagtttcaggcagggaaagggatcgatcgagtgcgtgcacatgcaaaggaacagatcagcagtgtctgtacacataattaagttctctaattaaattgacagttgttttagaataatagcataagaacaacaagtgacactttttcgagattataatatgatatacattcatatgcatgcatggtagcttgatgtcacatgcattgtagtcgatgcttcttattccatcttgccctagctagctagcttgtccttaatctgcatatgcaagcctgaccatggatcagagaatcccactgatgcgatgggagagagatattgcttccgtgcaacaagctcattagctagctatctttaggcaggcagcgagatagtgtatttaatatttattatgtgaggtgctagatttttaaacacatggacgaacgtgggagttggacaagacaaatctcgaatcaattattgtaacgaacttgaaaagaggctccatggccaagtggtaatggttcttccaatttcattaagtgtactagctaattaattaatggctgtaaacaagacggctaagcgttgtcttaatctaggccttgggtttaattcgttgtcatgtggcatccttaatgacgccttttgtcttctctgtctagtcatctagtctcgctagctctctagctgtatcaccgcaagcactccacatagacgacgttcttacacacttaatctcactagctctgtctaattagttttgccatacatgcaaaccctttggtatccaaattaatagaagcatgccaggaaactaaacatagacattcttacacattgtagatgaaattaagttcgtgttgacgtaatataagtaatgattaataaaaaaaacatgtacgtgcaacagaggcagggaaagagctgaagagggtggaaaaggtatatgcatgctactacatgaaggggaaaaaaagcactaccatgtgagtagcttggactgaagtacatatactacatggagtcaagaaatctgagctaatctggttagtacaattatgatataccctctccgttaaaaaaatcaaccttaaaaatgtgatgtctaaatttattttactaaaaaaatatttctaggttgagtttttttagggggggacggagggaatatatacatatgagtaggtagggcggtagggctttgcctgacacttggttagtacaattatgatataccctctccgttaaaaaaatcaacataaaaaatgtgatgtctaaatttattttactaaaaaaatatttctaggttgagttttttttggggggacggagggaatatatacatatgagtaggtagggcggtagggctttgcctgacacttgtaatgcaaagcaatgcaaggaaccaatcaatcgctgcctgtgcaacctacttcggtcaaaaaataaattacaataaatctaaacatgtatatcttaggttgatttattttagaatagagggagtaatagggaataaatccaggggccagttctcagcagggtttgtaacgtacatgctcgtacaaacatcacaatggcactggcacgtcctgtgcttctggcacgaatattaagtaccaggtgcagtaatgtgctactattacatccatatatgtgtatgcatgatttccttttatttgtgtttagtgtgattactttcttcttgttaatgagagtaaataaacttatgtgagctctctaatctgtttaatttagctagctatacatgcatgctgaaatgaccacatcaatatataatagtagtgttacaatagtgagtaaagtgcacgaccggtctctataacttatatactcatgtcatctagatttttaaactgttaagatgcagatttagacaaaaaaaagattaacaggttctagaatttggatgcacatttttaagagtttaaggacataagttagcgcataagtttagagaccaccgatgcactttactctccaataacaccgtgaacaaatcaaactatatatctctactattataaaaattgaagatgtttttcctggtattttggtacgctatccgtgtttgagtcatcgttcgcttttggaaatacagatccatgcttgacttggatcttagctcgtttacttttggaaataaaaaagagtcgtataaaaaatcccttttaaaaaaactccatatactaacttgagatgaaagttggactcttaattgcaactcatgattatctaaagaaatccaaacgaattcccacagtaaattttaatctagttaaactatctaataataataagattaaaatacttgttgcaagttgcaacgcacaggtatttttctagtgtatatatactatggctgagatcgatctggcctgcccccaattcctcacgtctcgcctgctatcttgcctgtaaattaatgcataagtagaaaacatgttcgtttggtccgtctctcttgcaatacaaaagaggaaacaggcagaacttttgcagtactagctacagcaacaagtcaagagacagttgagcagtgagaccaaatggctttgtatttggaaattggaatcttactgggagaagagagatttaattagctcagggagggatggaacggtggcctccgggaaaaatataatacatcggctgtcagcagaaaattaattagaaacagtaacacaggcttcaaaagatacgttcactagctactagttttgtccatttaaattgaatgatgatgagaatcttgcagagaggccttgactccaagtctatactggcatatgtatatatacgatacgtactgcagtttacacgtaccgacgtacgtgcttgggagtcaaacttcacaaatcatatatacattcctccatgaagacttggaggcttgaattcacagcagagggccgtacagactggaatgtagtgaaatttattgatgtttgttcacacgaggtcaaagtcttttttgaattaactctgaacttgcatcaactaattaaaagggttcaactttggtgatactaatctagctagctgcgatttaacaaaatccactcaaaaatataatccacagagattaattatgacactaattaagatgagctctatggtgcatctatctcattttgtcattactagctagatgaggagcatcatatttatggcaacatatcctatgcacacaggccctcacgtgtacacacgtgcacaccaaataaaaaatatcaccaaaaaatctagaaaaaatcatacacatactttcaattgtattacacctagggttaaaatcttaacgtcaaattcattatattttagccgtaacaaaaaaaacaaaaaatctgatagttttaagattgcaattttgtcagaattttatcttttttgttattctctatgtagaatgaatttgaagatgcgactttgcacgtaaatgtaatactattgaaagtacatgtatgaattttcctagaattttttgtgataatttttagtaggtgtacacggtgtgtacatgcgagggcatgtgtgaataggatacgctccccatatttatatatatgaacaaataaaactgaaaaggttgtgaacactaatattacctccgttttaaattttagatttgttctaattcaaatatttttaactttaaccatcaaattacataaattcatataattttaataacatgtaaattatatattatgaaagtatgtatttatcatgataaatctaaaacataaattttatcttgttcaactatacatattttcaaaaactgagagtcaaagttagcaatgtttgactaataagccattgtttagttcccaactttttcttcaaactttcaacttttccatcacatcaaaacttttcgcttctaactttttcttcaaacttttcaattttagtcaaactttcaattttagcgtggaactaaacacaccctaattaataggataaagctaaaacaatataagtatttttgaaacggatcggagggggtattaaggtaggtcattagggatggcaatcgggcgcgacgggcacgggtagtgcctacccatacccatgcccgtgagattatttgtgcccgtgggtatacccattactacatgacgggtaagaatggttgcccatgcccattgcccgcgggcgccttatgcccgcgggcgtgcccgtttacccgccacaacaaaagcagtggaacaaaaagtctacaagctactaagttcgaatcgaacttaaaacatcaaatattctccgcctcggtgtcgtatctctcctctggcggcgatagagtaagaggagagaaataataagggaaataaaagggaaaccgtagaaaacaaagaacgtggcttatgtattctagtggattttgctcctagcctacatgtaagttagatttcgcgggtaaacgggcaaagcgggcatgtgtagtgattacccatacccatgcccattacccatcgggcatagcttttgacccaataagatatccatgggtataaaatggagaacaaacccaaccctaatagggtttttacccgcgggtaaatgggcaaacgggcacaattgccatccctataggtcatcctagatactagcaagcagaaatgttatctctacttaatttctaacttgatcaattctgaactaataaccattcttacactagatgcactctcccacacactagtattaattaactctgcacacacatatataatccggcatcatatatatgttatatatttttttatgcgagaataaaattaactaattttccatttgccacttgggcattaatcctgccagagtaattaagtacgcagctggtaggagtggccgggtactgctcatggcccttctcatgattaatttatgcgcgcgcgcgcatacatacatacatacatacatacatacatacatacatacatacatacatacatacatacatacatacatatatatatatacatatatatatatatagatatatatatatatctatgtatatgtatatgtatatgtatatatgtatatgtatatatatatgtatatatgtatatatatatacatatatacatatatacatatgtatacatatatacatatatatatccggaagagcaccgcacgtcgcgcggtgtccggtgcgcccccggcggcccttgaaaatccggaggaccgagtaccgtccacgcccggtcgtactcataaccgcatcaggtctccaaggtgaacagcctctggccaatggaacaatgtaggcaagggaagtcggcaaaacggatccgtaacttcgggaaaaggattggctctgagggctgggctcgggggtcccggccccgaacccgtcggctgccggcggactgctcgagctgctcgcgcggcgagagcgggccgccgcgtgccggccgggggacggaccaggaacggccccctcgggggccttccccgggcgtcgaacagccgactcagaactggtacggacaaggggaatccgactgtttaattaaaacaaagcattgcgatggtcctcgcggatgctgacgcaatgtgatttctgcccagtgctctgaatgtcaaagtgaagaaattcaaccaagcgcgggtaaacggcgggagtaactatgactctcttaaggtagccaaatgcctcgtcatctaattagtgacgcgcatgaatggattaacgagattcccactgtccctgtctactatccagcgaaaccacagccaagggaacgggcttggcggaatcagcggggaaagaagaccctgttgagcttgactctagtccgactttgtgaaatgacttgagaggtgtaggataagtgggagccctcgggcgcaagtgaaataccactacttttaacgttattttacttattccgtgagtcggaagcggggcctggcccctccttttggctctaaggcccgagtccctcgggccgatccgggcggaagacattgtcaggtggggagtttggctggggcggcacatctgttaaaagataacgcaggtgtcctaagatgagctcaacgagaacagaaatctcgtgtggaacaaaagggtaaaagctcgtttgattctgatttccagtacgaatacgaaccgtgaaagcgtggcctatcgatcctttagaccttcggagtttgaagctagaggtgtcagaaaagttaccacagggataactggcttgtggcagccaagcgttcatagcgacgttgctttttgatccttcgatgtcggctcttcctatcattgtgaagcagaattcaccaagtgttggattgttcacccaccaatagggaacgtgagctgggtttagaccgtcgtgagacaggttagttttaccctactgatgaccgtgccgcgatagtaattcaacctagtacgagaggaaccgttgattcacacaattggtcatcgcgcttggttgaaaagccagtggcgcgaagctaccgtgtgccggattatgactgaacgcctctaagtcagaatccaagctagcaagcggcgcctgcgcccgccgcccgccccgacccacgttaggggcgcaagcccccaagggcccgtgccactggccaagccggcccggccgacgcgccgcggccggccgcctcgaagctcccttcccaacgggcggcgggctgaatcctttgcagacgacttaaatacgcgacggggcattgtaagtggcagagtggccttgctgccatgatccactgagatccagccccgcgtcgcacggattcgtccctccccccacacaccctctcccccgcaccccgcgcaggttctccccccccctcccgagcccgccccaatcccgccgagtccccaatgtcttggtgggaaggcacgaagggaaaacgcgcttgccaagccacgactctaaggcacggcaggcaaccgggtcgtcccgaaagccaccgggcagactccaaggacgggacgacgggcgggctccgggcgcgcgccacggacagcgggcggtcggacggcgcccatgcccaccaagccccccaggcgtgcggctgcacgcaacccgccaaggtcctggacgcgtaccgcgcgatagcacccgcgccaccccgggttcggtccacgtccgctcgcccgagctcccgagcgacaaccgtgcgcgagctgtgaagggctgcacactaggggtgcgtggggctggctacggccctagcctatagtagcctgtagtggttcggtccacgctcggggcaaccgaccgggaaccgggtgcgaggtgtgaagggctgggctgccacccgccgggcgaccgaccgaaataccgattcggtcgacgttcggtccgccgggcgaccgaccaaaaaccgtgtgcgagctgtgaagggctgggctgccacccgccgggcaaccgaccgaaaacccgattcggtcgacgttcggtctgccgggcgaccgaccgaaaaccgtgtgcgagctgtcaagggctggacgctaggggtgcgtggggctggctatggccctagactatagtaggggggaagggatggccgggctgccacccgcacggcacccggttcggtccacgtccgctcacccgagcccccgagcgaaaaccgtgcgcgagctgtgaagggctggcccgtgcagccaccagccggccgaccgaccgaaaacccggttcggtcgacgttcggcctaccgggcgaccgaccgataactgtgtgcgagttgtgaagggctggacgctaggggtgcgtggggctggctatggccctggactatagtaggggtgagcgcatcgacgggctgccacccgcacggcacccatttcggtccacgttcggtcggcggggcgaccgaccgggaaccgtgcgcgacttgtggagggctgcctcgggctgccacccaccggccgaccgaccgaaaacccgattcggtccacgttcggtccgccgggcgaccgaccgaaaaccgtgtgcgagctgtgaagggccggatgctaggggtgcgtggggctggctatggccctagactatagcagggtggatgggatggccgggctgccacccgcacgacaccatgttccctcggccggacgaccggccgaaaacccgattcggtcgacattcggtcggccggtgcaccgaccgaaaaccgtgtgcgggcacgtagcctgtaccgggcacggggggaggtgacgggagggctaacgctgccctggaccccgattcggtcgaccgaggcactagaacggccatgcccgcgagtaaaacgcaagccccgagccggtctgaggggaacgggagagaacgagaaaactgtgtgcaccctgtgaaggggcaggcgcggagggacctgaggggggctaggtacccagtacacctatgggaaaacgactcacggcactagccgaaccccggccgatgctgggtttcgcacgtgagatccttcccaccgcctcctagcctgctggcacggcgccctggcagtctcgccacgggcccgttccgcacggttttgaggcacccgtgccgccgaaaacacgggactcgctcccgacacctctcccacgcgtggtggccctccggtaggccgtcctcccagcagaccagccgtgctccgtgcggcaggatgcttgggcggccttgccgccgtggctgcgtagcgtatgagctgctttggaccggtgtatgctcgcaggacccccgccctcgtgcggccgactgccggctcccgggccccgtcattccacggccgtccacgcgccgtgccgccccaggcttcaagagatgcttgcgcgctgctacccgtcccacgggcagaggtgctcgcacacgtccgccgcgccgcgggcgccccaccgggcgttccgcggcggctcgacggcgcgagcggcgtggcctcgtagcacctggcacccaagcgtgccggcgctgccaaggccacctcgcgcgtgccattggtcccggatgccgcccacgatacaggctcacggcggccccgccccgtgcctacccataagcgagatgctctcggaagacgacagcctgcccgcccactgccgtgtccgccgctcccgacccggggacggcggcgacgcgcgtcggacggggcgggctcgtcgcggaggacgtgctacctggttgatcctgccagtagtcatatgcttgtctcaaagattaagccatgcatgtgcaagtatgaactaattcgaactgtgaaactgcgaatggctcattaaatcagttatagtttgtttgatggtacatgctactcggataaccgtagtaattctagaactaatacgtgcaacaaaccccgacttccgggaggggcgcatttattagataaaaggctgacgcgggctctgcccgctgatccgatgattcatgataactcgacggattgcacggccctcgtgccggtgacgcatcattcaaatttctgccctatcaactttcgatggtaggataggggcctaccatggtggtgacgggtgacggagaattagggttcgattccggagagggagcctgagaaacggctaccacatccaaggaaggcagcaggcgcgcaaattacccaatcctgacacggggaggtagtgacaataaataacaataccgggcgctttagtgtctggtaattggaatgagtacaatctaaatcccttaacgaggatccattggagggcaagtctggtgccagcagccgcggtaattccagctccaatagcgtatatttaagttgttgcagttaaaaagctcgtagttggaccttgggccgggtcggccggtccgcctcacggcgagcaccgacctactcgacccttctgccggcgatgcgctcctggccttaactggccgggtcgtgcctccggcgccgttactttgaagaaattagagtgctcaaagcaagccatcgctctggatacattagcatgggataacatcataggattccggtcctattgtgttggccttcgggatcggagtaatgattaatagggacagtcgggggcattcgtatttcatagtcagaggtgaaattcttggatttatgaaagacgaacaactgcgaaagcatttgccaaggatgttttcattaatcaagaacgaaagttgggggctcgaagacgatcagataccgtcctagtctcaaccataaacgatgccgaccagggatcggcggatgttgcttataggactccgccggcaccttatgagaaatcaaagtctttgggtttcggggggagtatggtcgcaaggctgaaacttaaaggaattgacggaagggcaccaccaggcgtggagcctgcggcttaatttgactcaacacggggaaacttaccaggtccagacatagcaaggattgacagactgagagctctttcttgattctatgggtggtggtgcatggccgttcttagttggtggagcgatttgtctggttaattccgttaacgaacgagacctcagcctgctaactagctatgcggagccatccctccgcagctagcttcttagagggactatggccgtttaggccacggaagtttgaggcaataacaggtctgtgatgcccttagatgttctgggccgcacgcgcgctacactgatgtattcaacgagtatatagccttggccgacaggcccgggtaatcttgggaaatttcatcgtgatggggatagatcattgcaattgttggtcttcaacgaggaatgcctagtaagcgcgagtcatcagctcgcgttgactacgtccctgccctttgtacacaccgcccgtcgctcctaccgattgaatggtccggtgaagtgttcggatcgcggcgacaggggcggttcgccgcccccgacgtcgcgagaagtccattgaaccttatcatttagaggaaggagaagtcgtaacaaggtttccgtaggtgaacctgcggaaggataattgtcgtgaccctgaccaaaacagaccgcgaacgcgtcacccctgcccgccgagcgctcgcgcgcgaggcaaccgaggcccccgggccgcaacagaacccacggcgccgacggcgtcaaggaacacagcgatacgcccgcgccgcccggtcggccctggccgtccggcggcgcggcgcgataccacgagttaaatccacacgactctcggcaacggatatctcggctctcgcatcgatgaagaacgtagcgaaatgcgatacctggtgtgaattgcagaatcccgtgaaccatcgagtctttgaacgcaagttgcgcccgaggccatccggccgagggcacgcctgcctgggcgtcacgccaaaagacgctccacgcgcacccccctatccgggagggcgcggggacgcggtgtctggcctcccgcgcctcgcggcgcggtgggccgaagctcgggctgccggcgaagcgtgccgggcacagcgcatggtggacagctcacgctggctctaggccgcagtgcaccccggcgcgcggccggcgcgatggcccctcaggacccaaacgcaccgagagcgaacgcctcggaccgcgaccccaggtcaggcgggactacccgctgagtttaagcatataaataagcggaggagaagaaacttacgaggattcccctagtaacggcgagcgaaccgggagatgcccagcttgagaatcgggcggccgcgccgtccgaattgtagtctggagaggcgtcctcagcgacggaccgggcccaagtcccctggaaaggggcgcctgggagggtgagagccccgtccggcatatatatgtatatacatacatacgtatatatatacatacgtatatatatacatacgtatatatatatatgtacgtatatatatatatatgtatatatatatgtatatatatatatatatatatatatatatatatatatatatatatatatatatatatatatatgtatgtatgtatgtatgtatatacgtatgtatgtatatatatacgtatgtatgtatatataggtatgtatgtatatacgtatgtatgtatatacgtatgtatgtacgtatataggtatgtatgtatgtatgtatatatatatatatatatgtatgtatgtatgtatactcagtttgtaaggcttaagtctttgcttcttaaagagacgaaggtattgaaataattacgaagtgcaagcttttatagaagcgtatatgatggagcttttctctatttttgggtggaactttacaagaagaaatgaagcttagcttgttgtctgtctttaaaacttatttatgctttacctatgtaacgggagagtcttatgtgctcgtgtttgtgacttttaggctgcgtacaccctcacaaggtgtagacccgggtttaatataatctattattaaaaaaaaatatatatatcttgatccaataattaatttaatcactaggtagatgcatgataacgatcaatcaattaagctgcagtctcaaagaagatctcagaagtaagagacagagaaattataaataatttattgcatcttgatttttttggggttgtaagctgtgtcgcgcgtcgagccgtggtacacgaagccagctgacgtgagggagacgaaggcgcgcacgttaattagcgcgagagcagagtggcaattaagtagctagggttccgagtttaatatcacagagaaagaggtaagagcaagtttaatggtatagtctactactagctccacttcatttatagctaatctaatagctaatttatataatagttacttactatactattaatatatggtctcacatgtcatacttacattgcgtcttgtagcccgtgctgcagctaactacatatctgtagtccgctgctattctctctcatcttttatcttatttaaatatgtttacagctggttaatagtttgctattgtatctgctctaagagcgatcttagttaattattaatccacatgcttaattaagcatgtcctttgcgccaaagtcggcttctaaactggtcttcggatcgatttgttacgcgcaggaacttttggtcatttagaaattaggatgtgcagtggcagggattaatagccggccaagcattaatattagtaggatgtacttcctccgtcctaaattataaggactacattttttatacacagtctttaatggtatattttgaccattaatttacttcatactatgtttttaacaaatataaaattagctttacataaaaataatttaaaagagtaaattgcacccacgatacaacaacttggcaggtgggtgcgatataattcaagaacttgagaattgaacatccgagtgtaacaacttgacaagtgggtgcgttctagtataagtgcttgacaatttagtattttggtgaatcaatttggctaagtatatgctaggtgagttttttcacattgtcaatatgctaatacacagtaatcctacggatattaccttataatattgaatttaaactttaagaattatatttcacatacaatttacatccaattacctttaagatttttttttgtttttttcaccttctcaaatatcaacggaaatataataatttctacatgcggtttaattgactttcagttattggttattaggataaaaatataaatatgtttatacagatccacgctagtatattgtcaaaataagtacttaaaaatttgaacttatataaaaaaatgctccaaataattaagttgtcacataactgcttatttgttgtattaaaattatacctaccttacaagttgttacatttatacgatcgattataaagttcttatactaaattacacctttctgccaagttgttgtactagaatgcttatttttcaagttattgcaccaatttgcactcacctgtcaagttgttgcaccttgggtgcaatttactcaatttaaaatataaatctagtgatataacctataatttaaaatataaatctagtgatataacctatgatataacctatatagcatatggagtatatggttaatataattattagtaaaaaatagcaactttaatttttattaaaaagagagcgttctataatttaaggacggagggtgtaattaatctgcatcgtatccttcaattcttcttttatatatatacactctatatgacatccacaaccgcatgcagtatatatcctcctctcatactacccaatttcgagaatagatcagcagtaatttaggtagcagttcgtgtgataaactgataataatgacagctagtatggaccagttgttacttgttttatggtactgattaactagtactcatggttaaatcatgacgcatagtatatgcgtagtagtattttttttctccgtctgaacgcggtcaatattaatgtataacatatgtattgaagtacgcatactgatgcagtataagaaacaaaatattgattaaagcaagtgtttgtataacacacggaattagctagtaattagtagcaatcgcgcttatgcaaatcaaacagggtcgtacaaataaaaaggacatgtacatctctttttattttttagaacatctcttaatttggagctcatataagacgtgcgacatattatatattattatagtgtgtttaatgtagtgatggcgtcagtgacgaagtcaaaaattactatagactatggctataagatgaaactcaaccgataaagtgttggattttttatatggtgattaacaaaaattaaacataattttggaggcagtcctagttagggctaatgccctagcttatgcctccacccctgtgtggcgtcgtgcagcttataatttctttttcattgtaaatccgtgtttatttaatgtgaaaacgacgacgtcagatagctaagggaatattagctaggtactagtcgtacatcgacacgaaccaactgtgaaattaaaatacatgtatagtaggtaagatgttgacatgcatatgtgcatgatatatactctcttcagttataaatatttaacgtctaaggtaaacacatgtatagtgcctaggatgtgtcgacagaaatgcacacatgcttactcctccggttataaatatttaatgcttaagataaatacatgtatagtaggagttagggcgttaacatgcaggtactccaatggtcataattacttaataatttattaatattttaattaaaattttgaaacattgataattaattttatattagcataagtttataaaacccaataaacatatgctatatattatggtacttttgacagacctatgcataagatctctataaaccctcaataggattttagggatgcttggaattaacctctattctcctctttaagtttgtttgtattttttgtgtaacaaaaacaaaatccgacatttttacgtaatactccattcctttcatattacaagtcgtttgacttttttcctattcatttttttagtttgaccatatttatagaaaaaatagtaaaatctataacactaaattagttttaaattaatatttgaatatattttgataatatgtttgttgtatattgaaaatactactatatttttatataaatctagttaaacttaaaagagttaactaggaaaaagatttcaaatgtcctgtaatataaaacggaacaagtaatttaaatcgtacaagaatcaaaaggtccgagcgggccggcaccgcttcaatattccgtctttgcaccctttggtcatgcatgcagctagatagcagggcagtacctccccactcccccagtagcgtcgccagagatggcatcagaagaccagtcagtccctgactcccctgccccagagattttaccatgcatgcagccccgttaaattcgttcccctttttaccgccatgcatgcgcgcacgcctctgcctttctgccctctgccgctgcacctcagctaagctaaagctaaattcctcacgcggcctgtttggtaagagaagggaagagaaatgggagttttaaggagggagttaatggtggaattggtcatgggagttatatttttagtcctcattccttgtttggtttcacgtcgaattccctccaagtctcatgaattaacaggtctctcccaggtaagatattggtgagaattcgaccttttaattcctcatcccaaaccccctcgaattcactcctagatatcataaactcccattccccatcaccaactcccttcaaccaaacagtccatgtatgttcgctacttcgcttgcgtctcgacaacactttgcatctcgcgaaacaaagtcagcgaccaccacatccacaccccccatcatatatctctctcgccatgatacatcctctcatctcttctctccctcctctccatctttcttttctccttttctttctttcttttcgcacttacaaaacagcactgtcacttctctctctctctctctctcgtctcgcaacaattttgtccgcttccattgggagcgcggctactggctgggtttacccaacactataccaccaccagtatcattgtactactaccctcgcgagcgtcagagagagagagagagagaggaggtggtggtggtggtcagatcatcatgtgtgattacttcttgcaacggatggagggggagcaggccgccggagacctcgccgacatcgtcctccgcgccggcggggctgctgctgctgctgttgcgggcggcggcatcccgtcgacggagtggcagctaccaccggcggaggaggaggaggaagagccgggtctcttcccgctgccgccgtcgtcgtcggatggctccggcatgagcggcgcggatgcgttcggcgacccgttcgctggcctccccgaccccttcggtggcgactacccctcctctggcggagcggcggcggccgccgacttctttgacgccgtcgtggccaaggccgggttcgtcgacgtcggtgtcctcggtggcggcggcggcggtggctgcgatggaggtggcgttgatggtggtggaggagggtcgtcgctgctgggcatgagcaagcctatcttgcctagggccgccatgcagttgccgtcggtgtcgccgagggcgatacggccgtaccccgtgatggccggtgacacggtgaagctcggcgcgccgatggccggcgggccgtgcgcgttcgacggcgccgccgcggcagggctgcacatgtcgtcgtcgccgcgtggcgccgtcggcgggatcaagcgcaggttcgccgcaccgatatatgatcgctcgctagctatagctcgctgtttcgctcagatctacgcaaactaataattcttgacgagcgccatgaaaccgagtcctttgatttcttgctgtgctggaggaacagttaaaaagattcccaatttagggaaagtttgcgcttccttttcttgctgcccagcctgcatgccctacaatttccccatcttgcacctcccaacaaggcagtaaggatcaagataaaggaaagaaattgtgagccagtttttgatctgttcagacaaaaacagcaaaaatcaaggtttcatacattcaggaatcatctagctgatgaaatgaatgttgcgacttcgtcaaagccagcaaaagtggtatatacacagataggaacatatatattatagcatcgcatagaaggctaatttagtagctcttcaaatcaatttgttcttcaaaccctaagtttcagtttccacatcatgttcagagaaggctatatatccgtacatctgttgaaaacgagtaattaagctagaaagtgttgatctgatgattgagtagtcgagtactttactgtgcatgcatatgggttgcttgatgtggtggattttgcatctgttgatgcaggaagaaccaggctaggaaggtggtgtgcatcccagcgcctgcagcagcaggagggaggaccagtggggaggttgttccttccgatctctgggcttggaggaagtatggccagaagcctatcaaaggctctccttacccaaggtatgatgtgactgcatctgaactattctctcacactaatctctgcctttcacttgcataatatacaatggctaccatctctcttcttctgctactctaatccttgtatacatctggatatctgtgtgctgtcataattgtggtgatcatcatctaatctcataacacatgctcaaactccaatagattcctcaccccaaccaggagaggggaagacacatggattcctgtcttttctattgttagtgtactatagttgttgatagaagcacatgatacaatataaactgcaatgggcacaagtggaggaagtaatagaactaatttcagttttcccctttttttctgagcttggtagtacattaattactttgtcctttcaactggactgtggaattttcatatatagttgcgtatatccttgatatgtagatgctggatggtgtaaaaaaaaattggttatctcaagaaactaaggaattttctcctacttacaaaaaatatgtagagtacatacgtctaatcatgatccctctcacatactttcaatctcctaacagaaatgtatactcaattcaactttaatttgatgcataaagagatatgatgagctaccttttttaaaagggactatgatgagctattataataaaccaaaagaaatttagtatataatatggagttgccttgctatccacaatgccagtttagaagttttgtttttttagaattattatgtgataagttttctaccaaaaacaagttctctttctcattaatcaggaagaagttaaagcgcacatattggaatatactgtttccaacttgcaaattaactagttatctccccattgttgagtaagaaatccatgtagtgatatatgtggattgtgtttaagttagacttaattaataaaaacctttttttgcaccaatcttttttattaagaaattatatttaatgtatttatatatgtgcatgttttcatactctttgtattagtctatgtagtttgttctttcgcaaacagatatatgtgatcaaagttaggttcttttttacttccatataaaattataaaagttaatgtcaggtgctacttacctagttttggttattgtatattatatttgtacgagatcaattactttgattgattccctgtggtcaaaacttgatctttattgagtgtgatttaattttgtttgttattttaattttagtattaaagttatagtaacattatttttaaaacgtcaaataagcatcattattgtgacaatattgaatttaatatagtaactatactttatttttgtattggtttcaaaatatgatttccatatatatgagcaacctaaatacttaacatggttttatatggtttgctgaagataatgaataaaaaatcacatgcacaccagatttatattactcctattttttgtttcacacaaagaagcatgcaactgtcctaatttacattaaatgaaaaatcatgatgattacatatgttaacatgttttcactggaaactagtaaatgtgtgatgatcagtcctagaggtgaatgaaacacaatatgcagatgtagtatatgcatatcatgactttatttatttcgattgattgcccgccaagatatatatataaaatttaaggtttattattattatatacttactttgttctaaaatataagcaactctggttatgcacatgaaaatacgttcagttgcataggcagaaatgcttatattttggaaggttatatagaggagtacctgttttaacatgaatagatgcagtttcctcctaaatatatgtagctacacgttggcgtaccacatcctgaaatttgattgtgtgcaaatgttcatttcttcagagggtactacagatgcagcagctcgaaaggatgctcggcgcgcaagcaggtggagcgcagccggaccgaccccaacatgctcgtcatcacctacacgtcggagcacaaccacccgtggccgacgcagcgcaacgcgctcgccggctccacgcggtctcatcacgccaagaacagcagcagcaacagcagcagcagcggcgcctcctcagcctccaagaacaactcctcccacagcggttaccaccaccaccaccaccagaagccactcgtcaaggcggaacccaacgatcaatccgccgccgccacgaccgccgccacggtgccggtgaaagaggaggccgccatggtagggacgtcgtcggaagcattggcgaagacgacgcagaaatccatggaggatgctgctgctgctgcttcagccacggcggcggcggtggagcacagtgatctcatgcagcagatgttcagccagagctaccggccgatgataccggaggcagcggccggcggccaccacgacgacttcttcgccgacctcgccgagttggagtcagatcccatgagcctgatcttctccaaggagtacatggcgaccaattacaagccagcaggtgacccagcaggcaaggagatgaatgcagtagacaagggcttggatccagcgtacatgctggattggtcttctaccactgttgttactagagctggtgggagctcatttatgcaaggggagggaggtttatgacattttaatcactttgaaacaaaaggcaaaagctagtatatgcgaatgcaaacatcatgatatgtgtcttaattagagtctagatagtaaccaacttaaagatgacaagagctagcaacaaaattaagcaaaaatgtgagagagggccttttctcctcttataccctggtatgtgttgagtttgctctcccttttccatttcttctttctacatgtgttagaggtttccattttgttccacacaatttatgcatgcctcctttggaagtaggaattttataggtttttttgtaaaaaaaataaactagatcatgtaaaaatactgtaaaatttctacattccaaaaggatgccactagatgtaagtgtcacttgcttttctttgccaacaatgtcttaggtaggaaggttggtgatgagtccatcaatggcgctttctctctctatatatctatctctatctcccatgcattgtttttttctcttttgcagtgttcattgttatagcagaacactatattctatgctgttggagaccgaaacaaatgctcctactcgatgaaaagagcattataaagacatgtacttcaagatgtgacagaaagctggaggccgcagtgatgaaagcttatgttgcaactgttttaggggaagtgcactagatgtgacctgagtaaacatctctctctcctcagtgggcagaacagtgcagcactggctgttctctgagaatctgaagagaaaagtttgagaacaaatgcttctctcgcatcgcttgcatgagaaggggatatgttggatctgcccgtggtacatagttttgtctcctgtgaggaaaatacatttaatccactgcccctctgctactggccggagcacacatctgatcggcctcatggcccatgcatatgcatgcatcatactcctagctgcctagtactactactcccgatactgtactgctgcacatgctacgcattgagtctacatatgtacgtacatgtatgtacaagttgcacaacaactatatggtcccttctgattcaaatgaaattcatagaaattctaaaggattttatttctataggatttttttctatatagccctttgaatcaaaagaatgaatcctatataatcttatgaaatttctatggaatgtctaatgctatgtaagttttggaggaaatctagcatgaggttctacctcatggaaactttcctatgattcttcatctctcctctaattcctatgttttttctgcggtctaatcaaacgaccattcctatgttttcttgtgttttgcaatcctctgttttgcacttgcattcttattagaatcctatattttttctattcctccgtttttttattcctacgattcaaaggggccctacatgtatatatacatgtgatcactgacagacgtacaggcaaccatgcatacgtaccacatactccctccgtccaaaaaaaaaagacaaacactgggtttccgtgtccaagttttatcatccgtcttatttgaaaaaattatgaaaaaaattaaaaagacaagtcacgcataaagtattaagcatgttttatcatctaacaacaatgaaaatactaattataaaaaaatttcatataagacgaacagtcaaatgttggacacggaaacccagggtttgtctttttttcgggacggagggagtacgtacgtacattcatgcatgctatgctacgtgtgtacagtacatgtctattagtactactactggtagtagtaggctgttaactccgttgatcgatctggccggtcacacatcgtcacatgcactagtagtagctagtatcgcttatgtgtacctacgtttgacgtgtcgtccaactatacatgttttggcttcagtccaaacttcaacctgtacgaattaggaggagtggagtactcccatgatcaatgcaatgcatggcttttaggcatagaacttgttctgccaggccgacacgagttaataccttttcccatccggccatagtgcgtgcgcgagtacgtggggccacccgttttgaatacataccccgccaaaggagctaaccttgaccgtaaacgtacagcagtagaaccgtgtgtggggagatgtgatattgcaaatttgcagttatatgtagcagcctaagcatgcgataaacggcagcatacacaggtagggatggaaaaaaaagaccaagctcgatcgaagtaaccgggaccgagaaattcggtcctagtgtttaaccgaccgagcttttattcattcagtaggctcggttaatcgaaatatccgagaaatacccaaattctacgtgagacccaataacagccactagcccaaagaagagtacacacgagccatcctgtcacatcgtcccctgtgtagcctcatcatcctaccgcgcgttgttgtttgttggtgcctagtgacgacacctactctattggagatctagtgcccagtggtggtcatgctggcaatgagcggaggagggcgactagagagacatttgtcgatttttcacgtcggccgatgctggccaaggtaccaacctttggcctcgacggctcttcaggagctgaaaattgtggaagttatgatggtttctgttatttttttcactgtataatttcgattatgatcgagaccgagcttgctcagtcttcaaatttgtttaggactgattggtcttgagttgttgatgcctgaaatttcaatcaagactgaaggccgatacacactgcacacaacaggtgtgtccctttaacacatgctaaaaaggagtccatgataaacaaccaagagcttactattactcatttcttttttatttggactaggagagccaagctcccccccccccctccccacacaaaaaaaaaaaccttttccattaatagaaattagcatttccaatttttttactacatttctatttgaaagcgtgtaagggtgtgtttaattgtgcaaacctgattgtaaaaaagtggatggagtcatggttggatctactttcccatacaactccatcaccacactaaagatgctttcctagcttgcaccatgcaagtatatatacattggctttgctaaaattcatgccatcaagcaggctttgttcttttcagcttacatgggcttatggattatgcacaccacggtttctcaaaccacgatttcttcacaaaactttatacatcagtatttgcttaattagataatatatctgatcatccataaagaatagggtactggcggaatgagaatttttttttgctagtaataatatctgtgagagtgaaaactaaaaagaattcgtgaacgaagggaggtatatataatgtataaatatttggtggactttgattattataaatcaagccaaatttaaaggagcgtcttaaataagtaaaattaggcacgcataatgttgctcctttttttttcaaaacgctcatcaaatactccctccattccaaattgatctacatatagtttttttgaggttattcctaaatgatctacatatttgtgttcattcattaagtctattcgttatttgtgcattggagtaaatggacattgatgcatgcatccatgcacacaagtatttataacccatatgcagtatcttgattttctattggctaggaaataatggggatggtgcatgcattgagtttgttgctagagtaaatatagtatgtgggagttattatattttcttagccttggtgtatctatgaaatatgtagatcaatttagaatggagggagtataaaggagaaaagaaaaaaaaacgaccgtgcacacgcgggtgcatatatgatcttgtctccccagttactatcaggcccggccggccgaccaggcagggccagaaaatcgtggccgttccctccctcatcacagtagctctgatacgtccctttcgctttacacgcccagcagtctagtcaaagaaaagccagtggacactaaagaccactcatgctttttgcaatttttttccctagctttggctggcctggtgcttgcattgcagctagctagcaatccccctcaaatttacttgggacatggacgctatgtgtggtggagtgtcataatcgagctaaagatgaacagcgtcttcaattaatcaaagtttaggaacatcatgctgtttgttttttttaaaaaaaataatatatactatatagtacagtttaccagaaatacaggattgttcatatgagtcgtatcgttgtgaccctatatcttcatttagattttaacatcgtaggccatgtttaaaaaaaaactcatctaatttgcacattgtagactttgagacatcaaatttaatatttcctccatcccaaaatataaaacttctatcatttagattttttttcccaaaatttaataacttcttcaccaacattttttttccaaccaatcacaatcattcaacatttattttccacctacctctacttcttaaccaattacaaccttctccatttaattttatttactttattaataatcgtgtttaactctaaaacttattatattctgaaacgaaggtagtacaacttatttttttatcgattttaaattttggacttaattatcaaaacatgagaaggctacaagcctacaactaagactctaagtcaagtaaattaaacttgatatttcttgattagtcctactccctccgtccaaatcaagtaactggacagtatttgtttttgctcattcatatatagcaaagaattgtttttttttcaccggagggagtacgttttataaaggagacctgagctattcctttttcttcttttgtagttcaatatactacaccatccattctataataatccaaatataccaacactttcacctgcattatgatcttctcaactaaaaatcacaatctttcatcagtcggtttctccatgtaatttattttctcaaccaatcataacatattctcctatttaattccatccttattttttttagaaacgcagatgttcataatacacgtacactcgtcgctatgaaaacacacgctcatcctacctctactagcaccttcgaaagactggatcgatatatcttgagattgataaagtcaccacgagcgtctcgttgtcgacagatatcctgatacttttttataatttgtaacagaagtacgtactcataatcctccagaagagaggaaaacggagccggaagtttgcatggaattaattaacgggattgatacgacgtataccagtgtcgtccatgttggatcaccaaaccctcgaatcacgcgcaggagttgacagaggtggatggcggtacgttcaggagctccaccgtgggccgtgtgatgagccgcccggtggacgcttgcaagttgcaatccggcggatgctgcaggcagtccggtatagtgcactggtgagaggcagtgatgactgacaaagcctggatttgtgcaacgattcaagacaactgaacagaactgcgagtgtggcaaatccaaccatggaacaggcgcgcgcgattggctccggcctccggggcctcgactggccacaaacgtacggacacgcaaagaaaaacgtactgtatgcaaataaaatactactagtactgctccaccttttccattctaaattactagttctgctccactttttccattcaataatatagcaacataatataatagccaataagatgtagtacattctaatactacgaattcaaatgacaatattttttttctagatttgtagttcatctagatttatagaattagaatttgttccatctgatactaagttgctatgttttgagatagagatattaactattatatccgtcctaaaatacaatacttcctccatcccataataaaataacctagaatcgaatatgatgtatcatagtaccacgaaaatctggacggacacgtcacatccagtccaaagctattatattctgaaacaaagtgagtgacttttagctacgaagatttatagccaaaaaatattactctctccatactaataaaggaagtcgtttagaacagcgacacggtctccaaaacacaactttgacttattatttctataaaaatatttattaaaaagtgatatatgtatacttttatgaaagtatttttcaagacaaatctattcatataatttttacattttcaaactcaacaacttgagagatattcatgatttatattcccaatgtttgacttaaacattgtcctaaacgactcctttttactagtacggagggagtatattttaaaacagatgtagtactccctccatccacaaaagttacgcctattttacatttaagtttttctaaataagttgttcctatttgtagtatttatgcattcaagaattaaatgaagagataaattaaatgttttattagaacccaaggagtcatctaaatactcattggttgcatgcttgcatttactccttgattttgtaacatccaaagtgatttaatttctctttgattttggtgtccaaagtaatatgtgtaacttttgtggatggagtgagtaatttattactccatccgtcctattttaagtcctattttaagtgtatttgtggattttcgtaccaaacgttttatcatctgtcttatttgattttttttattagtatttttgttgttattagatgataaaatataaataatactttatgcgtgactttttttaactttttatattttttaaataaaatataacgttggatatagaaacccacaactaaaatgctatagagggagtagtattggacagtgtcagagagtcccacgtacttggagtagtcattgtttgatgtgtggccttctgtttctttcattgaattggcaacatttggttccttttatctaaccaagtgatgtgattgttcgatctagtagtacgcacaaccaagtgccaagggcgcatcgatgcaatattgcaattactgcacatgtgacatgtctcacatattaattactcttccgtcaataaattaatataatataagtattttatatatttaaattttgtaatttacaaatataaagttcctactgaagttttaaggtaaagagagatacgatgaaaagttgaattgggtatatactcaatttcaacaatggtgcccgggcaccatgaagcaccaaacaaatttactattactatataggacactcatatggggcaccatggtgcccgggcaccatggtatctaatgcataaaatcacttaaaattttcaaaattttcaaattgtgagtatatacctagttataataattcgattcatacctatacctatcaacaaaacaactcaaatttaactttatttcacaattcatgattacatacctaactaattatatgtatggatgctatatacctagaatcaaaatctaacaaaaacaagttcaaattcagttcaaacttgctttgaactagttagtaaagtggttaatgttaatacctaagtaattgaaaaagattcatactcatttgaattaggtatatactcaatttcagcaatggtgcccgggcacaccaaacaaatttaatatatatatatatatatatatatatatatatatatatatatatatatatatatatatatatatatatatatccattcccgcgaacacattaccacttgtatttctgccatcgtcgcttcccatgatgatctggacaggtgattctttagagcatcccagcagctcctctattcggtcctctatcccctttttgacgcatggaggtgaaaaacaatgctccagcagaccttccatcacacacgccatttttggaggacctccaaaccgagccattcccaagccaaatatggaggttctctctcctcacaccatactcaactgccgacctcgcgactgcataccgtgggagagaggaggtgcataccggatttggaggtggagatcgccggagtagaggcagagaggcaacgatctggcagtgaggtcgccgccatccccaccgcttgaggtctccgcccgcgccgccgctcctctgaccccgccgcccctctgtcccgccgctcctccgccgtccctccgccgctcgcgccgccccttcgcagagactgggtggtggtggcggcgggccatcagcgggaggaggagggagatggactcgccgggaggaggagggagatggacccaccggccgcctcccgccgtccgtcccttgcgccgcccgcaccgctcctctgaccgcgctgcccctccgcccagccgttcctccgactgcgctgcccctccagtcggccctcgtcatccccgtcctctcggtgctggcggtaaagaaaagagaaaggcggggagatcggcggtatagaagagagaaaggtggggagtgaagagataaaggtggggagtttttttagagtggtgataaatatgtggtagttgtaaaatatatgatgttggtatatggaggatgtaatatggatgatctgttggagtgaaaagtaatatggagtaggaatttttttggatgactatctaaatgggagtatggaggatgaaatttagatgagctgctggggatgctcttatagtactcttgctgcaaacccagcattatcaatctctaggattactggcatatatatgcatcactagatcgttgcttcaatattccctctagacacacaagagcttactattatgtccccaaaaagtaaactctagctatgcatgtgtccagattcatagctagaattgaacttttttttaatggacggggtatgtctaaactataattcttctctaaatattccattgacattgatttttgcatatgcccctcaattagtgctagccatttctttttactccagcaacacccactcaagcttttcccaccttgcccccaatcacttttgtattcttaaccacccatcatttaaggggttgtagttaactataactcgctagtcaattgctactcacccttagatattaagcgatggtttctaatatcttctccaactgaacaaactacctttttttatatttactctctctccaagctataggtgtactcttgagctcttcccctacacaccatcttccccacatcccctctcgtatcctacccctcacgtcgtcagatctattgcctcatctccctctcatgccttaacacaactctattttttgtttcccctattgccgccattaccgctcaccacgctcttccgtccccacgacttttgtgacaccgttgcctcccatgcctcattctctctgtaaaccctgaaaccctaacctgatggactacagtaaccataccgttgctatcgctgccggagaggaagatgagcgtagttgggacgctagctgcttgtcgcattttgtcggtgagtttaccaacgtgctccagggattgaagaagaaaggtgaataattgaatcttgatccaactattcagataggtgattgatttttttttggaaaaaaatcaggtggttggtaaatatctaataagtcgttcaattaatgagggacattatgcgaagtgagtgtagcttaactggttaggttccttgtggtggaaccttcccaggcttgacacggatgctcgcatttacggttaattatttttttagtggtagatgacgtacctatcattaatatcaagatataccgttttagtcttttagaagtattcataagggtaaggtgtgtgcgcgttcatagggataaatgtatgtattgtgagcactatgtttgtatcatgtttctaaaaaaaataatgagcaacattatagtattttctttcttcattcttaatcttgtagaaacgggagaatgctgatatcagggaaatgagggagtagtatcacattgttttcttttctaggaaaggatggcaaggacactgtatatattcgattgcgacgttgcaagagatagttagcagagagcggtacgtttacaagcagacaagcagcacgtgttcgcttttaggaagtactcccctacgttgtctcttggtgacgagcgcgattgcgtccagctgtcctgcctgcatgtttgcacgtagtcccgtcactgaaacggcgcgctgtcccctccccccctcgtctcgtccgaatcagcgggatccgcgcccctccaaccctttgccacacagttttctgctacagcccacacccgccggccggcgacgcgaagcaccgcgcgcacgcgcgcgcggcccgcgacagcccggccggcatagctcaccaacatcacacgcggttggcatggcatctcatctcgtcgcgcgtcccgtcccgtcgcatcgcatcgcgccgcgcccggccggccggccggtatacgtacgaagcggaagccgtacgttgtagctagcctccggcggctttggcgcctcttccccggccccgcgattcgtcgcggccggcctctgcccgggccgacgcgacgtgcgatcgatcggctcgccatcaaccgcccgattggcccaaatatcaggctttgattgatgaatcgcgtggggggcaatggctatacgtgtcgtccgccacgccgtgcgtccaccacccagatgcaatcatgcacgcaagtacgtacgtactatatatcgaccactacacgttgcggcgatcgaggatccagatcagggggggagagcaacagtgcggactagcagtagcatgcatgcacacaaacacggctacactgtattgctgctgctgtcgttgggacggcccatcagtttcacttcagccagccagttggtgacagaattgaatggtcccgatcgatcgatcgatcgattgaatcgatccatacagacatacttcctccgtccttaaaaaaaaaaaaagcaggctatgggttttcgtgtccaactttgactatctgtgttatatgaaatttttttataatttatatttttcattgttgttagatgataaaatatgattaatattttatgtgtgacttgtctttttaatttttcttatatttttttcaaataagacggacggttaaatattgggcacggaaaccagatttgtcttttttttttttttacggagggagtacagagtatatagggtagagcgtcgccctcgatctaatcattgtgtaccgcgaaattggcaagcgatgatcttctgtagaggggagagggtgaacagcgtcgcgaggcaccagagaggaaagatgggctttgctactgtgtggaattaatgctgtgatgaatttggcatgtgcaactcaagttctccaagaaaatagtactagtaaaacaaactgttccttacaaaagtgggcctaagagtgcgtaccatttaaagcccagagtttttatggcctggtataggatgctacagggtcatccagttcggcccgaattgaactagagcccatctcggtcgatttggttattactccccccatccaaaaatgcatatttctttgatcatcaccatcaaaaagaaattaactcatatattatatattatgtgacagaactaggaaactatatatatacatatacaaccaataagtattaagatagttttttcgattccgataaataatttaatttagcacatactccctctgtccctaataaaattaaactctagtatcccaagaagctactccctccgtcccataatataagggattttgagtttttgtttgcactgtttgaccactcgtcttattaaaaaaattagaattattttttttacttactttattatccaaagtactttaagcacaacttttcgttttatttgaataaatttttttaataagacgagtggtcaatgggacggagggagtattaagaaaagaaacaaaagaccaaaatactcttaattaatgtaaaaattgtattgattgatgggtaggtgaggggtattggagtaataaaatttctcgatttgcggattggtggtaggtaagaatgtaagagatggtttatttttggacaaacttcaaactctaggagagactacaaatctacaatatgtcttagacttttgaaaaaaaacaagaaatgaaataccttagacacttttggatagagaaagtaagagaatagttgtccaaacatatatgtttgcagttactcttcgtcgttcgtactaccgaattgatttttttaaaaaaataaataatatatctgaagtaatttggtcaaagcaaagtacagtagtactgtttctcttatgatcatttcaagtcaaataaataattaacgagcttattaatacgtgaggttttaggtaggtctgaacaaaatcgtgaacacaagaatatgccaaggaaagttattagttgtaccaacttactcaaatagatatagctaattcttcagcgtccttatgatcttctggctactttcaatttcttcaagaaataaagcatggaagatttctacatagagaacatgacacatgtaatatatatgctgatgaatgcattaccagcagaatagaaaatggaatgagagaagaaggggagtgaatctgtcagcgcttgcatcattttgactgagcaggatatttatccgtcgtctatatatatatatatatatatatatatatatatatatatcttctcaacaaccacgtaattaatcagcgtgctatgtcatcgaatgggaagttggtaagggtctcaaatatcaacaaaacctcaacttatttctgatatattcattacataacttttttagcagtaccacgtgttattatttgctttcatgtacgcgcgattatattttgcataagaaaggtacgtatcgtatcaggtcaattataggctcgagaacatgaagaattttcaactagctggttccaattaggtgaatttttgtcaactatataactatatatattgagttatttaatagatgacgcattgacttttaggcacatatttgaccattcgtctcattaaaaaattttatacaaattcacaagatatataaatcatgcttaagtgcatatttgaacaagacgaattaatgattaaatatgtgttcaaaagttaacaccgttatttattactccctctgtcgctaattatttgacaccattgatcttttttaaacatgtttgaccgttcgtcttattcaaaaaatttaagtaattactttttttcctattatttgattcattgttaaatatactactactactcaagtttttttaataatattcacaaaagtttttaataagacaaacggtcaaaaatgtttaaaaaaatcaacggcgtcaaatatttagagacggatggagtacaagcaaaaggagtttgtatttgcttcaactcctttccttagttcacttcctggaagaactgtaaattgttttcaccattcatgtaataacgctgcatgaatcaaaatttacatctcttttaggtgaattcaacatcgaccattttgattccccgcaaaagggaaaaccattgaccatttcaaggtcttgtttggaatatgctacatgatcttcacatgttcacataataatcttagaaaatgaattcaactgaacaatctatatatagtcctcgtaggggcatgataatgttttttttatttattgaaccttttttaaccttttattttacgaatatactctctcaaaacttattttcaaatctaaacttttttagtatgctaaccaaacagccgtgacgaaataatgctaccatgctgatgatgtagtagactaatagtgttatttggctttgctggtcttactactgtggcattgtggcaacataaaactatcacatccgctacgagtattatgatagtgttatcatactaggtaggatagtgtgatcaaaaggttcaaattttagaaataattcttgccataatttatttttgaaatttaaaacttaaaaaggtccaaaacatataataaaaaaaatgttgacgcgcattgactgacaaaagcccaaacgattcatctgtttcagcccagtcctctgtcggttagctggtctccggcgaccggcgtagctccgacggcgcggcgcagcctccacttcacctgactacactgccctctcggccatacctctccggccatctcgagccgccatgtgaaaaacgccgccgcatcttcgcgctgcgccactcgcggcgggtcgggttcgttcgtcgtctgagtttttttctgggctgtgccaccatgcagtgggtttccgccgttggttacttggtttaatatctctttagcactatatatgcagctttatctaaggagagttaattcagctgcgtagagccgcggattcgtgccagggtctttggtttgttattgtttactgcaacttctgtattatctgctattttattaaacctgtttgatcttttgctttttgatatcagaagcaatggatcaaatcgaatattagtacaggacacatgttcacatgtcacagtctgccaaattgatatctgaactctggagctactgctaatctactcacatgtcacagtctgccaagttgatatctgaacttactgctaatctactaccccaaccagggaagaagatttgctttcggcaatttgtgtccttgtgacatagacatgcaattcaagtactcaggagtattcaatttcattgctgtaactcaggagcttttttcctttatggaaaggtgaaactgtttgtaccttgatttctggtacagtaaagcgtatatttcctttttcatattctattatacagctcggattcgaagttcagcagaatcaattagtttctctagttccttgctttgatccaatattgtggcgtggctttgatagctcaggagtaacatgtaaatacatctataatcattttcactggcatgataaatttcatgccatgtattttgtttagaaccactgcttaaactgataaggaggtaatttatgaaacactatcaaaatagacaggactgcatatctagtaatctagcagcaaattgaacactttcagaaacattccttgtttggtatctgaatcaactttagctgcttatattacaccatgtagcatttattttacttgccatatactactaccttcatttcaaaataagttcattttacacccatctcacacataccaatataaaaccaaaaaagactggatgctccgacctcatcaaatcctagtgtaactatttttcactttatctactcctaatataattatttctacttttactccgatgtaatgattactctaaaaataaacttatttaatttgggacaaactgaatgagctataaatgatcttattacgggacagagaggaagtacaagctacagaatacggaccaaagagggtttgatggcaatgttcggacctttacgtttcttaagtttcgatgctagtataaatgccctggtggcagtattcatacgtatatatgctactaatatatgttcccttgatggcaatgttcgtacctttatgtttcttaagttttgaagctagctagtatactgttttgtttcatatctccgtcgaaactataaaagatatttgtgcagtgctcaacagcaagaaattcatgcatgcagtaggtgattgtacgttggcgtaaattgtgaagtggctgaaaagtgaaaactactaccaggttaatgtcattttctcatttccccataatttttcgcttcttgatattctctgactgcatgcctgattatgtttagcacttattcacctacttatccaccaaccttttcaaggatgatatctttggtcaaatttcaagatttgatctgatcagttttggaaggttttagctgtagttggattgtggtaagagaaacttcaggtattagttgtaccaacctattggcaggattaagtctagtttatcaagataaaaagataaaacacatatctgtcggcaagttctgcattttcttcaagcaagcttcaaaactcagaagattttttcttgatgtaagatgttgatgactgagaacagggcaactaaaggggggaaattgtcaaaaacctgatatggtttacgtctgactgcatagctgtagtcctcttatcaattttatatagttacattatggagatggaatctcacaaccaccacaaaattggaacggtcctgtgatcaaaataagaaggttctccttaatttgcatgcgcttatctgttcatcactccagaagagaagaccaggaatcttgcgttgacacaacgaattttaacccttgttctgttttacacaattcgttatataattcattgtggcacgtgttgtttgttcacatggagaacattcgaagcacatcgtgttgtttgttcacatggagaacattctaagcacatgaacaagattggtaaacttcatatgaccaaagttttccatcactttctgttttcattcaatttttcactttgtacatatgggagtccactataccatttgtacatgaactcttgacttttgtttccctatacctacttcatcatcgtaatcacaatatcttgatactttgttaatactttaacagagttgaaaaaatcgacgcaatcttggatcagctatccaactgttgcagaaattacttttttataggtcagtcagtatttcttgaagttgaagaaaaacaatcaactgtttccttcagtgacatctagccaatgtttggtgaaacatcttcagaaagatcgcgttacaattagtacgttatcaatgtatgctaatctgcaggggcggagctagagcgagatggagggaggtgccacttgtttaacttactctgctttatatcaagtttaagctaatgcgggtgtctaaatttgtatcgaggggggtacacacatggtgaaaataggtcaagtatagctacaaaattttcttgaccgggttcctgggcacccccctcaaacactctagctctgcccctgctaatctgagaagacagtcagcattacctagagggcaagaacaggcagtttgttaaaggattgaccaggcattttatctccttaagttccttgtgtgaaagaacaatatacgtatcgcagaacagactaccacgtgtctccaaccaccccaaattgtgactgtttaaaaattttaattagtgactaataataggcagtctcaaaatccaaaatacctgtatgcatcagatttaagagtgcactggaaatttggaatagctacctttcctaaggtccagaacttcactgcagggttgaattccacgagacattatgacttttgcgaacctaaaaactttctccatcctcatttggcttgacagcgagagggttctcctaattttacacgtgctggttaatttttatttcgagatttccttcaaaaaaaattatttcgagatgaaatcagagcttcttgtgtcttttgcccttggatttccacgcttcatcgagcagtaggtgctctggcaggtaaatccatatatatgcatgacttctgaagttcagagttttggggcattttttgtgcgaacacagttcagagttgggactaagtttgagatgagactagtatattcagttaaattaatacagttttatctaccataacgggactgtcaaaccttgcaaatacgtcgtgtcacattttcttcagcatttctaccatctatctccagttaatgccttcgttaactgttaccctggcagaacaattctaattccactccacgcatgaaactgcatccaattctcggaagaacgcaaaaaaaaaaaaaacgatcgtaaaactcggccgaaatggcaaaactcattggtgcagtacaggtatatccaaatacagataaagggagaaaaaaaaaggatagggcttcgaacgggatcacatccctgtcgtaatgatcacaatcgacgagtaaagtttgaccccaaaatttcctgccaatccatccacggcccatctacgcatcttcatctccctctcttcactgccacctacccacacggacagcgacatggccaagcccaagccgcgggttctgaactccggcatgatatcgccattctccaatctccacccacccagttcagtccacttccctatgccaactgccaaagtagtaaaccacccacgtttctgcccagaggagaggagtacaacataaatccgacatggcgacatgggtgggtagggccagtggcgaccggagaccgcgcgcgcacgagcttttgcactgcacacgccgagagccgagcgcgacggcgacgacgacgattcttcggaagatccgacacaatcctcgcgcccctccgcctaccgctctacgcatggaaacttccgtctgttttgttgtgcatggctacatgcagtgcgggtgttggttgaagaagtgttggccttgggtgtgaatgtgattaagaattttttttaggtgatatggccgcgggatcttgtacggggtaaaccaaccgcggggggccgctgctttgaagcgttcgtacgcgcgcccagtacgcatgcccgtgacaaagtacgactagtaattaatcttgcgcgcgcgacggcgacgcttaactaatcccgcacttcacctgtacagcaacaccaccttgtcgcgcgcgcgctatatatatatatatataagctgttgtcgcagcttcttccatcattagcaggagagccgagcgagagcgtgcgagcagagcaaagcctgggaagggaagcacagaagaagaggggctagcctgctcaacttaaagctctcatttgctgacaagacactgacctcttcggcgaatttcgtatatcgtcatggacgccggagacgccatggagagcggacagcgcgcggcgctcctgcccgaggtaatggccgccgtctctcgaatctcgatctctcttcccatctctcttcaggccacagtgcaaccatcgaccttgcaacacgtctcagcattggtgcagtttgtcagtttagtttttcaacagtgcgttcacttcatttcctcctcgcgtaccgggtgcccaaaatggcagtgcagcgcgtcaggactcgcgtcaggagacgagggaaaaaaaattgagatcagaagtatgcgccggtacatctatctttgaagaaaacacaatcttggctgagcaatgacgacagcaagaatgcagattttttttatggaagggagcaggtggcttagctcgcagcaacaatatttgaccaaagataagaggatactatgtttctcaaaagacaataaaatacacagataatcataatacacacagataatcataatacacttgatagatacatcaaacatgttgtcactatcagacacgcggtgcccagagaaggttccaagaaccggctaaaattatgaaacgcaagcacacacaccacaactactgtttcgtctacccttcaccaaatccctacgaggagtttaggggctgtttggtttctagggacttattttaagtccctgttacatcggatgtttggacactaatttaaagtattaaatatacattaattacaaaacccattccataaatttggactaattcgcgagacgaatcttttgagtctaattacgccatgactttgacaatgtgatgctacagtaaacttttgataattatggattaactaggctttaaaaaatcgtctcgcggattagctctcatttataaaattagtttttttattagtctatgtttaatactctaaattagcgtccaaacattcgatgtgacatgggctaaaaagttttagccccatctaaacacccccttaggaccctttctctttcttcctcacccgacaatcacaagcactgatgtttgcattacgtcataccatccactacttttcaaacacacaaattaatatgtgtcgattcgtttttttccccttttcttttctgatacgaagatgtgcgtgcaaattcagatattctctccttgcttctgaattctgataatattttgtgctattttgtctcaaattgcagagtcacggaccaaagactgaagatgatagcctgcaagtgccactcctcaaggataagaaacgcggcggcagcaaggcacctgcaatagttctaggtaagcattggcgcatagtaaaatctcgtttatttgcagcagctgcaatgcaatatgcatggaacaatgtgtcagtttgagctagtgctcactggatcgaggccggtgcaaatggtgcagggttcgaatgcctggagagcacggcgttcaatggcatctcgacgaacctggtggtgtacctggagaccgtcctccatggcagcaacctggccagcgcgtccaacgtcacgacgtggtacggcacgagctacctcaccccgatcttcggcgccatcgtcgccgacacgttcctcggcaactacaacaccatcctcatctccctcgccgtctacctcctcgggatgatgctggtcacgttctcggcgttcctgccggccacggcggcgctgtgcgcggcgggcgcgacgtgcggcaccggcgcggccgcggcgcagaccgtcgcgttcgtcgggctgtacctcgtggctgtcgggagcggcggggtgcggtcgtcgctgctgccgttcggcgccgagcagttcgacgacgacagcgcggcggatagggagcgcaaggcggccttcttcagctggttctacctctgcgtcgacttcggcctgatcgtctccggcgtgctcctcgtctggatccagcagaacgtcagctggggcctcggcttcggcatcgccaccgcgtgcatcgcggtcgcgttcgccgcgttcgtgctcgccacgcccatgtacaagcgccggttgccgacgggcacgccgctcaagagcctcgcccaggtcgtcgtcgccgccttcaggaaggtcggcatgaagctccccgccgacgccgagctcctgtacgaggtcagcgacaaggtcgactcccagcccaagatcgcgcacaccagcgagttcacgtttcttgacaaggcggccgtcgtctcggagtcggacctggaggagaggccggaggcggcgagctcgtggaagctctgcaccgtgacgcaggtggaggagctcaagatccttctgcgtctgctccccatctgggcgaccagcatcatcgtgtccgcggcatactcgcagatgagcaccaccttcatccagcaaggcagcgccatggacatgcacatcttctcggtgccggtgccggcggcgtcgttaagctccttccaggttctctgcgtcctgacatgggtgatcctctacagcaaggtgatcgtgccggcgctgaggggcttctcctcctccggagccgccggcgagccgtcgcagctgcagcgcatgggcgccgggcgcctcctcatggcgctcgccatggcggtggccgcgctcgtggagacgaagcggctcaacgccgcggcgagcggcgaggcgatcaacatcgcgtggcagatgccgcagtacttcttcctcgccggcgcggaggtgttctgctacatcgcgcagctggagttcttcttcggcgaggcgccggacaccatgaagagcacgtgcacgtcgctggcgctgctcaccatcgcgctcgggagctacctgagctcgctcatctacgccgtcgtggaggcgttcacggcgacggcgggcggccacgggtggatctccgacgacctcaaccagggccacctcgactacttcttctggatgctggcggccatgtgcacgctcaacttcgtcgtgtacagcgggttcgccaagaactacaagctcaagaccgtgctctcgtgagacgtcattgttagctttgcagctgcttgtcgaacacaagaaagattcgattacatttttgcacaattgccaagttgcgattggtgaaaggtagtagtacagtacagattattacagagtacagacacaattgccaattggcgattggtgaaaggtagtacaggaagaaaattagtgcagaattattttcccctttctctctctctctctctcttttaaaaaaaagtgctgcacagatcctatggcatgtcagcaacactttttttagatgatcattttttgttgaaagattacaggatatgattgccaatgtacctttttcatatgcaattcgatctaaggaaagaagtacttcattcaaaaatgaagtgttagagaatcgtttttgtcaaaatacaacttgtgtgacatttgaacagggggaaacaatggaagaatttttgtgtgacatttgaaaaggaaaaagtacaccgaaggtccctcaatttgtcatcgagttacaaaatcatccttcaaccgcaaaaccagatattcgacatcccttaactaatcaaaaccggtcataataggtccttcggtggttttgacaccggttttatcttacgtggctcacgagtcagcgtggaacctacgtagaccccacatgtcaggatgccatgccatcatcatctctttaccctcttctctcccttcctcctctctctctttctcaatccacgtcaaggtggaccgcgtccgtgtcgccgcgccaggagccgcttgtgctcgtcatctcggcgcacgcagcaagcggtctaggtgtcgacgcattgccgagtccaacccgcacacgccgccgatgaagaagaagaagaaggccaagaagccggccgcctctgacgccgaggccgacgcggacgcggacgccgactacgaggaaggctcacgactctggtgctgctgccgccgccgccatttctatccctttcccctcccctccacgactccgctgccgccgccgccgacgaaacctacacagagccacacggcggcgcgctcgaagcaatcaaaccaacaagcagccgtccccgccgaatcgaatagggggaagagagaagttgaggggaagcagcagcgcgccgatctccatcgccaccggcgaagcagcagcgccggcggcgtcctgctgctgcttccgccgcgtgctctgagcctcctctgactccccttagcccctcgattcccgtctcctcgcgagctcgtttgcccgccgcctgcgccgatctccatccatcccgcgagcagctgtgtcaccgtcatcatggtgagcaccccgtatagacgctcgtgcgaagccatccctcaccgccgcgctcgtcgccgactccatccccaccactgccttcgctgccggagcgaccatcgcgcaggtgagaaggagctcgctgccgccgcatcgccacgccaccccgccgcacgaggggggcgcggaggccggcgagctcgcgccgccccctggggaaccacggcggcagcccggcggagctccacagcgcgggcatgcaccggccgtgcgcaggcgtcgaaggggagcgcggtggtggcaggcaaacgcggcggaggccaagctcctagccctcaaccgagtgcggtggtgggaggcgagcgcggcggcggctgctgctggcgcctcgtcgccgcccaactccgacggctcccgccccctgctccgcttcgcgtggagaaccgcgagcgccgacttgctccgcttcggccaccacccgtctcggccccgttgcctccccgctgaagaatacagaagagaagaaaataaaagagaaaagagaagaaataagagatgatcgggcatcctgacatgtggagcccatgtgggtctcacgctgactcgtgtgccacgtaggacaaaatcaggctcaaaactaccgaagtatctattgtgatcggttttgattagttaagggacgccgaatatctgattttgtggttggaggatgattttgtatctcgatgacaagttgagggaccttcagtgtactttttcccatttgaaaaaggactgtgttaattgttacctggtaactgggcctacttgggcctcattgactgttcgagtaatttacggtccatgacaggcaggcaaagttagttggtccatggaacgctgggctcgcagcctgcgccgtgcaccggccttatcaagcccataaagagagagacgaaaaaagaataaaccgtgtgcccgtacgctctctgtgctcatggtttgacggagtcgccaacggagtcgccggcccgcagccgcaggtggccgagagaccagctaggtaggagagcccgcgtgctgcctacgcgatgccatctcaccgatccccaccgctcgcatccaaacggacggcccagatgctacgcatatcctctcgaactttctgggctgctggcttgcctcaagtccctcaacaaacgaacgctgcttttcgacgaagaaaaggagggttcctcgctctgacgccttgcgcagttgtaccgtacattcgtactaccacacagcttgaagaagaagagggaattcgacgagaaatagtagaagcttggcgttcgtgcgaggaattctcggtggttgatcgatccgtgtttcgcggcggatggggcaggcgttccgcaagctgttcgatgccttcttcggcaccagcgagatgagggtatgggtgatttttcttttttttgtttgtcaaaagtaagaagaatattctctttttttttgggtgtgttcttcgagaacttcttgattgatttttgctctgtgacgcttgctctttaggtcgtgatgcttgggctggatgccgcgggcaaaaccaccatcctgtacaagctgcacatcggggaggtcctttcgactgttcctacgattggtatgttgctgattactttgtcgcaatattttttttttcgctcatgtcctctgtgcgaaattcgaagttaaatcaaggctttacggttaaactagtcaagaagttaactccgtcggcagcagaggggcaaaaagaattatgaactccacatggattagcaagatgggggaagaatctgatatttctgattagcaagcatcgatttgcccttaagatagcaattatcctatgagagacaaccagttagtttgctcatcagactggccttaacgcttaacagatattatcatcatggcttttatggggttatttgaaaaatctgacatctcactttgctgggacactgattgatgcttctgcctttgtgctgtaccaccagggttcaatgttgagaaagtacagtacaagaacgtgatgtttacagtatgggatgtcggtggccaagagaagttgaggcctctgtggaggcattacttcaataatacggatggtttggtatgttttgtttcctttgtggttatctttttgggaatacgtgaaagatttgtgcatcgttgcattaaagaaggaaagaagtggttatttgattttgacagacttgtgtaatgatatagtattatatagccattctgcataggttattgtggttgactttgagacaaatatttcttagtttgacttattggttaaagttgtatggcatgtatgcaattgttttatccaaagtatccataaggctggtgaggttgctagatgatcctttgaacatttttaattaaaaaattaaatgcataccaatattgataccgcaaatatgtgtgtttaaaatctatggtaattcgatttgaatttatgtggagttatagaactcatttatttaaacaattatgatagtgagataacccaaatgagtggtatagaatttcccagttctcttttaattaacatgaaaacttacggatctagaagtaccctgtgcttggcatactatctattttcatgtaatggtattgtaatataatataatcatgcttaattatccagttaatggataatgttgtcgagtttgtcagatctttcactgtatgagattatagcaatgtttctactaattcaacacttaatgaattgctcttttgttgatactgtaaatgatatctttgcttgatttgatttggtttgatttattacagctgaacagagccatctttccagatataagctcattctggattattttgtgctatattacctaatgaagttactaattagctaatgttatgtctataatgtaaaccatactactcttcagttactaattagatgatgctcgtcagtaaaactttattctattttcttgttgatttgttttccttgagagatcggcgtgatactgaaattcggatgtattcatgagcatacccaactacatttataaattgtaatagcaacttattcctatatgttatttttgcacgttctgatttgcagatctatgtagttgattcattggatagagagagaatcggaaaagcgaaagcggagtttcaggtttaataagctattttaagttatgctcatcagatagcttgccttgttagtgaagctaaggtttggtggctttgttgcaggcaatcgttaatgatcctttgatgcttaacagtgtaatattggtatttgccaataaacaagatatggtaagtcaacagcacttgagaactccttttgtgttttaacatgaacgtgctctttttttttttttttttgcggggcaacacgtgcttgaatgcacatgtgtttgaaacctgtgaacatgttccgtattgccatccataaatgtatttcccagcattcattcatataacaaagaggattgttttacttctctagactgttgtgaacgttgtatgaaggtaaacaggtagtgttactcgtgagctgtttgcatcatgtgatcttttacattcgtggaaagatatgatgtcccacaatttttcatctataatagtgttgtaaagttgcaccttatttggttttgtgttgggttgctattgattccagtaatttagttcaatacacgaatggatgagattgtgcttctgtggcatgtctgaatctgatgtgactgcaccagtaatgctagttgccatcaaacataccataataggatgcaggttgccatattttttaaggatgatatctgaacaaatagatgatgacagaatctgaatatgcggtgaagcctttgaaactttttcataggatggcatgtttgccctctagtatttactactactagtaattagaacgatctatgccgaattgctgatcctgtctaatgcagcattcctttgttttgtcagaaaggggcaatgacgccgttggaggtgtgcgaaggccttggcctctatgatttaaagaatcgcatctggcatatccaaggctcttgtgccctcaaaggtgatggtctttatgagggcttggactggttggcaagtactctgaagggactggaagcctcaggtcgcctcccctcaggagggacctcattgttctaagtagcaggtctgcctgtaagattcttccgttgacactaacaatctttgcatcaaagatgatcatgggaacaaattatcttggtgtggaaggccttacatggtcacaccttacattgctcaggcgatatgcttcgcggtgtcgattctactgaaggcaaaagatgcatgagagcctgactacttgaaacattaccactgcagttttgtcatgggtagtagtgtagtagtacccatcgagtcttgtgaatttccttgaatgttacagctaactatcggatgcatttgttcacatgtgatgagtgaaacgcatgttgatgtaaaaagtttgtgtaaagttatgtttggcaaatgcaatttgtatcaacaaaatctgatcccatgacacatttctctgacggtcctacatcagaaccggagacaagaaagaaggcctatacttgcgtcgatgttggttggagcgagcctggattcctggagccctcgactggttggttggtcgcctgcaatctgttacaccaaacagtgcgcacggcaataatctgaaagccattatattctgggactgacgtgcagggatatacattttgaactaaatacacactggtttctgatgaactcaagtactcaactgatttcacatactgaattatagtaatctttttggcgaaacagattgtcaagttttttgtttattcggagcaaattgttgatgctgacaagcaaattgttgatgctgacaaatcgtgaatgaatatctatctgtatggtctactccctacgtccaaaaaaaaagacaaatcctggtttccgtgtccaacgtttgactgtccgtcttatttgaaaaaattataaaaaaaattaaatagacaagtcactttcaaagtattaatcatattttatcatctaacaacaataaaaatacgaattataaaaaaaatttcatataagacagagagtcaaagttggacacggaaactcagggtttgcctttttttttttttgacatagggagtattgggcaaacaattgatgttgacaaatcctgaatatatgaatatattactaggtacttcctccgtcccaaaatataacaacttttagctctcaatatttgtcccaaaatataacaacttctccacaacattttcttcccaaccaatcacaactctccaccattcacttttctcacatatcttcactacttaaccaatcataaactctccacgttcacttctacctactttcttaataaccgtgtccaactctaaaaaatgcttatattccgagacggatggagtatctataacatggtctaaggttagaaactttaattagttttgaaaaaattagtagcagcaaattttaaaaaaaagtgaaaaatctcctatcatttcgcagtttgaacacgaccagtacaaaaagaatcagaactgataaaaaaaatcgagctaagcgacaataaccggaaaagaaagatgagagaagcgtgacaacccgtgaggccgtgacagaacaacacacgacggcagccagagccagccgaggagaagcaagaggcgacgccgctggccaagtcggcccgttaccagccacatccacagaaaaacggggcgaacgcctcctcgcgacctcacctcaccccaccccccacccctcccacctccccgcgtgagggatgagatagaaaccgcgccgtcgcatgacgccatcgccggcggcgtccacgtccgcctctgacgccgggatgctcggccggcgcgtggtgatgctcccgtcggcggcggcggcgctggggctgcgccggggccgggcgcggatgcggctggggtgcgtgctcgagcacgtggccccgcggctcgcggtggcgtcggccgcgctcctgggggccggggaggtcatcgccgcggccgccgcggcggggaaaagcggcggggccgggcacgccgccgtggcgtcgacgctcgcgcagcttacggtcacggccgtggcgatcgcctcgggggcgtgcctgtcgaccaaggtcgacttcctctggcctcgcatcgagcaactgcccggtagctccctccctctccctctccccgtggtcgcttgtttgtgcatttgggtatttcattggagggttaactgctgaaacaattgtttatctaattatcttctaaatatgattaagtgtcatgtgagcatagctatgtgcttgagtgcttctatctcataaatgttatagtcgataagctcttaatctccttttaaagtgtataaatttgttatgtctttatttttcttagtaggaagtattttgttggattgtataaattgttatgtctttatttttcttagtaggaagtattatgttcacatgtaagattaattgtggttagcaaacaagagaaatatagaatgtagaagaataacctggtttttttattactgcttagttaattttttttcctggctttctggagtaagccaactatgctcccatttaagtaagattaacatccatttcttccctccctcatatttgttatcttgtatccacgcagacactcttatatttgaaggagtagaggtgactggatatccaatatttgaggacccaaaggtgttaaacaaatgatacattttcaataagcatttcttcagctgaatgttttcattttcgctctccagtttgattttctcaatgttatacaggtgcagaaagcaattgtttttgcaagtactgcccacattgggcaatttaggaaaacaggagatccatatgtcacacactgtatacatactgggaaaatcttagctgccttggtcccgtcaactggagaaagggtattactttccttgcgttctgtttattctttctagttgattattgcttttgttctggcttccccaacccaccattgcgtctcatgtaggcaatcaatacagttgttgctggtattcttcatgatgttattgatgatacagctgagaacttgaagagcatagaagagcagtttggagatgatgttgctagtttggtatctggtgtttcaaagctaagctacataaatcaggtgatgcatatgttagaaaaaaccctgttgagtgctgagtgcggacattgatttagaagggctagctgacttggcactatagttttaggatgcaatatattatggttgagagatgtgctgctcaagttcaacatgaatacatgatgttgcaacaacttgacagtcattgcaaacagccaaacatattctattaggttaaagcaacgattttgcatattgccaccactttgatagttcaaattgcaattaattttctctgtatatgctgaatcatgccaattttcaatctattgccttcagatgtctgaatgcagatctgtgtatacttctgggataatttagctcatgatatcctgttgtcgtatcaatcattaatgaattgtagatgctctcatggcagttatactttcttacactcaacattgtcattctgtttagtgttattgtctgtgcattgcagctactgcgcaggcatcgacaaaaaaacaccggtggaagcactcttacttcagaagaagtatgttctcttctatgctagcaaggtcatattgtgctaaagatgtcatgtcttcactcttttccgattatttgcaaatgagttccaaacatttattggcatgtatttgataatttcagattccatagaaggcatatactaatgttttcagaaaaccatggaattgattatcctcctgttgtcagtcaggcaaacaatctgcgtggcatgttattggggatggttgacgatccgcgtgtggtgctcatcaagctggctgatcgcttgcacaatatgcgaaccatgtatgtcattctaggcttctcaatactgtgtagtttgctctgctgattttattctttgcagccccagtcacttataaactatcctactctggtttatgacattttcattgactgtgttttcccttcaatttggcaacagccatttgaatcatctaggtgcattgacatcataagacagtccacctcaatatgaaccaacatgttctattattggaatgctcctttaacttcatggtgatttcaaatagttgctatactatgtatattttgtatcttactgaaagcagtatttcagctatgctcttcccattcgcaaagctgaagctgttgctcaagagacattggctgtctggtgctcacttgcttctcgattgggtgtctgggctttgaaagctgagctagaagatttatgctttgctgtccttcaggtttttattctggaatttattgtctatgaaagtgttattccttgctcaatacaacactactcatgtattcttctttgtcgacagcaagatgaacattataaattgtcctcatactttgatatttttgttgaatatggcgcttgtatatctttgtttttattggattagcgattacctgatggctttatgtctcgtcattgttatgttattataccttttttctgattccagggaaactctgtaatttattatggttaataatacgacatttcctaatctaaaattatcatgtatgttttttttttcaaacatattgatttgatttgagtagtaattctgcggtgcacaagttggtctgagtaaccagatcttttgcatggttgggtaatttatgtattatataactttaataaggagttgggttgacatctcaatgttttagaaggtttacattttctcatccaatataatctttagttgtacattaattgaattgattttttatgttaggcatacagatatataatattgttttgttcctcttcatcttgttggctgtgtgtcaattttgtggccccaaccattttatcttttggttttataagtttccttcctgattcggtctcactgtcaaatgcacacagccccacgttttcaagaaaatgcgatctgaacttactacaatgtggaattcaaccaacaaaactaaaagcacaagaaggtcatcaataagaagtggactacctgcctcaacaaaggatgtgcatacaacttccgtccatgattttttcagtctgagtaaccaagaaaaaccaaacatgaaggtgagtattgtaagatgcacatgtttgggtcttagtgaatcacacatattgaattgatgtgagttgacttacatggaattttgcaatgttttttcatttattctgcacttgtgcttcccacatgcgtctgcctctttcataaacatacatgaacaaaggcaatcaagcctacctgggagccaggtgatcacttgtgataaatatcttgttattttggttttttacctgcaggacttattgcaagctgtattgccatttgacctccttttggatcggaaaagacgatcctacttcctaaataatctccatggcagttctgaaacatctgtaccaaagcctaagattgttgatgacgctgctgttgcattagcatctttagcagcttgtgaggaagaacttgaacaagaattacttatatcgacatcgtaagttcagaccaatcttagtacttttcagaaggaatttgtctcttgttgtgtacatatgtcaaatctactagtagcattgagattctcatcctcgaattatgtgatttcttcaggtatatacctgggatggaagtaactttgtcaagtagactcaagagcttgtatagcatgtactgtaaggtaataataccacactaccatatgcacattggtgtatgatttgtttttttaagttcacgtgccatctattatgatcatacaatcgagaacttatgttggcctaatcataaggaattttcttatgtaactgcattccaaatgttggtttgcttatttgcttacatgttctataccaacagatgaaaaggaaacatgtaggcattaaacaaatctatgatgctcgtgcattgagggtgatcattggagacaaaaacggtgcattgcatggacctgctgtcaagaattgctacagcgtccttgatatagtaaacaggtttgtagcgaatcaagtatttaacaagaagtatttatgtcagcaaggaccaggcgcataggcattctaagaatttactacttttgcaaataaatgcttcattttatgtatcaattaggaccagtttatatccgtatttttacatgaaaaacattcttcttggcattttttcccacttttttctaagatccatgtttgagtctagaatttgctgaatagcacttgttccaatcaagaacttttagctatatctgattataacctttgcaaactgtctgctttatccatatatgcaggctatggactccaattgatggggagtttgatgactacattatcaaccctaagggtagtggttaccaagtaagaatcatctggcaccaaataaaatataacacgcattgataatttgaggcagtattcccagcaacctattgccagtataaatatattaggacgaaattgtccaacacttcctgcattcccaagtttgttcttccttgttatagatgcccaagcaaatatgactagctgtgcacctgtaccgtcaactatctagatttgaatcttgattttcttatccattactagatgttgcacagacttattttgtctctcttcgcttgcttatctgctggttgttttcctttctagtcactccatacggcagttcaggcatcggataactcaccactggaggtccaaataaggacccaggtagattttttgttcccgttcttccctttttttttttgaatagatctttaatactccctacattccaaattgatttacatatttgataggtacaccaagaccaagaaaagctaataattctctcatactatatttactctagcaacaaactcaatgtatgcaccatccccaatatttcctagccaataacaaatcaagatattgcatgtgggttataaatacttgtgtgcatagatgcatgcatcaatatccatttactccaatgcacaaataacgaatagactctaataaatgaacacaaatatgtagatcatttaggaataacctcaaaaaaactatatgtagatcaatttggaatggagggagtagtttgacttgatcctgatggagatgtttgttcgcagcgaatgcatgaatatgcagaatatggactcgctgctcactggctgtataaggagagcaaagttgactacagaagtggcacgagtaacaagataggacaaagtacatcgtacccatcaagttcttcggaagatgaaaactacatacaagatgttatgccctcaaagtacagttctatgaaaatggggcatccagtcctaagaattgagggcagccagttactggcagctgtcattgtcaggtatagcatgaatcaaaaaatgaactttgttgtttacccagaaagcttgctattgcaattgacacctgattatgttagttgatttgcagtatagataaagggggaaaagagttgcttgttgctgtcagttttggccttgaagcttctgaagctgtagctgaacgaagatcttgcttccagttgaaacgctgggaaacttatgctagagtttacaaaaaggtcaagctgataattttttttggtgatgggcactccttatgagaaaatgcttctatctaatattcaagcttatttcaggtttcagagaaatggtggtgtgcaccaggacatggtgactggtcaacaaacctggagaagtatacattgtgccaggatgggatattccataaggtttgcaagtgctgaaacattattatcttttgttcattacctcactttgtttgtttgcttccctttgtgtgttttcttctggtcttggtttgagtttcttgtgtttgaatagcattgaacttttgtatggggaactggttgtgcatgtgaatgtgtatgaattgaactgaaagttggagtggtgtaggatcaataagttctgttcatggggtttgattatgtcctgtatttgaataatgtgttttgcagcaagaccaatttgggaggcttttgcctacttttattcaacttattgatttgacggaagaggaagaggaagaatattggatggttgtatcagccatatttgagggtaaagaggcctcatctctgactcccgattcaagcaacactgaacgatcgacatctgaacctccaagctctactccattgagtgatcccatcaacaataaggtggacatattctggctatatctcatgtttattctgttttgtatagtccattaagaagatgttatagttctcttgttagtttgttactgcacgatacggatcagaacatacacccggattctcgaaatcagatagaaagcaacataatatgctcaatcctcaccgtttattcattatgccctgtaggttcatttgctcaggacaatgcttcaatgggaggagcaagttcgacgcggagcatcacttgtggagaaaagcctcagtgtaggcacatgtactgaaccaatccttcgtgaggtggccatcatctgctggccgtacgggaagataatgaggatgagcctaggcagcacagccgctgatgctgctagaagaatgggcgttgaagggaagctgctttgggttaatggccaacttgtgttgccccagaccgagctcaaggatggggatatagttgaagtgaggatgtagctgatgcgccatatctcctctgcccagggttattgataaaattggtttgaggttcaatcaactatgtagggtacattacctgaaaatcaacgaccctagggtcgtaacagactgaagattaagaaaacgtagaaaaccaacagcccaatacctcaattgtacagtccatttgtcgataagaatccaaggatgcgggatttatgtacaggaagtgctatatctgtacataaagctaccaactgtatgtatccttgtttatggttaaaatgtaaatttctgtaagtaaagttgtagtaatattagtcagtagttgacagttttctaggagctgcaattgttctgtacataatggtgaaccgttctatggcttgatcaccttggtactgagctagtgattgatgaacatggagtgagatatgcgcttggtctgtaaattacaaatcagtatgaatatttggacttccgatgataatatttttgcatattaaaaaactaaatttttagcactatgggagatgatgtctaaaactgactttttttccccaaacactagcctagagcccgtgcgttgcaacggaaaaaaacaaattgagtttctaccttattaaatcaattaataaacatttatattagtttaaccagtgttatgatttttcttattaaataaataggtgattttgaaatttggaaaaaccaatagttaaataggggaagacttgtcaaaagttggtgtaatagtatagattgtgaggtctaagtaaggtggaaatagataccaccattactaatattttaaatagtactttttttttcttaaaatataagtatttttagctataaatctggacaacagtatgtccaggtttatagtttaaagttactatatttttggaacggaggtggtagcagtatttagtatagataagtactattggtggtagtagggaaaaaaaaagaaaacaaaatgttaccgctagtagttttttttgttgcccgccaatcaattctcagttcacagatggaccaatttcacaactgctaagatcgatgtggttctaataattatccaatttaccaaatcatcaactactagtactccatccgttttacactatactccctccgtcccataatataagggattttgagttttttttacgtttgaccactcgttttattcaattttttttaaattattatttattttatttgtgacttactttattatctatattactttaagcacaactttccgttttttatatttgcaaaaaaaatttaaataagatgagcggtcaaacgttaaaagcaaaaacctaaaatcccttatattgtaggacggagagagtaagtcattttagcatttttcacattcatactcatgttatgtctagattcattaacatgagtataaatgtggaaaatacttatgaaacggaggaagtaataacaaacatggaagcgattattcacgatgttctaggaggaaaaacttcaaaacatgcatccgctcgcctctccaaaaattaatcgcctttccaaatttccatgggagagccgagaccgtcgtattcaactcctttgctaagcgtctccgggccccacatgcagtgacaccgcgagcgccgcaagtagtaacaaaacacaagcacagctaatccagattggcgaattgaacggcttgcatgacacgccccgcgtttccttccactcctgcgacgccgccacgtctcccccctttcacaggcagcgttcaaactttcgaaaatgagaaaaaaccctaggcgagccccgctcccaacggtcacatctctcgaatcccctcctatataaacccctccgccgcccaccccacctccgcatctcagctcagtacttgatccaccacccacaaatccgccgcgcccaaatcaggaggaggaggtaagaggagaggtaggtgccgagaagagatggaggtggaggcggcgacggcggcggccatggacttccacgcgctctcccgccgcgagctgcaggcgctgtgcaagcgcaacggcgtccgcgccaacatgaccaacgccgccatggccgatgccctccagtcgctccccacggtaagaatcccccctgattgattgattgattggtttgtttgatctgtccatttcgagggtttgggtgattttggtgtgggggtttctcgtgtgtatgttcgttgcgcgatttggcgtggtgctggtggtgattgatgagttgtgtgtcggttgcggattaggtggatggggtcgacgagatcggcacggcggcgctctgcctcccgacgccgagcaggtcgacgatgaagtcggctttgaaggccgccgcggcgatcggcgaggagcagcagcacgggagcccgctcccccgcggccgccgcgtgtcggtgatgtcgccggaggccatccggttggacgtcgaggagggcgaggacgagatgaagcgggatctcgtcaaggagatcgtgaggaccccgggcgtggcgctgcgcagcaccagccgccgcgcgagggccacgccagcgccgatcccgacccctgcgaccactaggcggaccgccgctgcgcgcaaggtggaggaggctgcgcctaccccagctactctgcggaggagccagaggacggctgctcggaaggccgctgctccggtggtggaggaggtcacggcaactaagacaacaactaggaggtctgcgagatcgaaggtgatggttgatttggagcaggaggtggaggacatggcggtggcgttgcaggaggtgaaggttcaggaagaggatccaaaaggtgagggagactgttatgctttttctgatcagattatttgtttcgttcgattgcttggatgagatttttatgcgagtttcgtcatcatgcagatgttgcttccgatgagaaatgtgatgaggaagaggaagctacgaaaattctgggaggaaacagtaaagaggtggaatcagaggagggtgaggaaggtgagattattcatggattctcattaactttcaaaaaagagtactgaattcgaatgctacgtgtgattagctatttcaatttggctgaatttgctgttatccttgtgcaaattgatgatgaaaattcgtgtctatgcagttgtttcttctgctgcaccaactgaacttgcagtaatttcagttatgagctgtgatgaccctaaggaggaggaaatagttgcaactggggaggaaccagctaaaacccaagaaggtgagatgcttcactctgttcttgcgtattccataatctatccatctttgctttatctgtaccaatgaagactgaattgtggagttcgaaaaacaaagcagctctgtttttttttctttacatgtagcgatctatatgaggttatgactaagaattgtagtattccaaatccatgcatctactagttgattcatatgtagagattttagattctgaatttgtttcattgcaaaacaaatccattcgaagtcacaagtttgtgagaattctgctcccttgccagtcatggaggattcaccaatcctaggagtcctgtcaaagccagaacctgtggaaccactcagcgagaagatagaagatgcctctgttggtgatggtctgggctttggtaaactgtccgcattgaaggagataactggtgagatgaatgataaggaagttgatgccgatgaggttccagaagagaagcttccagctgatgtgaccgatgacaagaccagcgaggaagatgacctcaacgaagttgagaaattatctgccgttgagataccacaggctgatctaacaggtgataaaaccagtgaggaagaggatctgaatgaagtgaaggaagggtcggcctatgagaatccgcaggctgatcggatagacgctgagagcagtgaggaagatgatcttgatggggattacagtgaagaatctgatattgatgaggagtccaatgaggaaggtatgcttgatgaggaattcgccgctgaggaatatgcctccagtgaggagactgatgatgagagtgacccctctgaagtggccactgattctgatgaagtggaagtagaaaagctgcaggtcgcaatggaggatggattgactgccgaggccaatcaggttgatgatgaagaggatgatttcagcggtgacctaccatcggatttcgacaatgccgacaacttcagtgatgatgaaactgagagcgatgccactgttgtgatctcatctgcttccaaggccgctgttgtgaagaccctggatgactcctccgtcactgaagcatccagtgaggaggaggtttctcaacaggaggtggaagcctcagttaactccatcgtgaagtccctggatgagtttactttcacggtggagggcacccagaaggatgagctgactgaagagatgaagagcacagatgatgctgaggatgtgggagcaaaggagttgaagaaagagaagaagaaaaagaagccgactgtccaggaacttaacgccacgagcatgaggaagctcaaaaccatgctcaaggaagagctaattgccaaggtaatgccatatttaagatctctttcgataaccatttcgtaatctcatatcattccatccccctgacacgttgttttgctccaattgaaggctgccgctggggaagggaagaggctggcgcttgcagagctggacgacaacgccggtggcgtcgactgctgatcgacgatgcggatggggggcgtgaggagctgcaaaacccaatgccatatgagactgaataaaatgaggagagctatagttgtgaagtgataactaaggcttcgtcttgctggcgtgagtacccaagttttagttgtgaagtgatacttaaggcttcgtcttgctggcgtgagtgcccaagttttagttgtgaagtgatacttaaggcttcgtcttgctggcgtgagtgcccaagttttcgtgtgtggggagaggcgcatcaggttgtgaaaccatggtttctctgaacaacctgcagtttgcgttggttctctctgtttccttttttctcgtggtcgttttgtgtctttgtatccgttccgtgctgagactctggcttggttaagccctaaatgtattttactgctatttacaagtaatcgagttctctgttactgctcatgaatgataaatatgtttcgattgttagaattgttatacggcagtatatgccattccaactgccactacttgtctacttacatctgcacctgcaaggagctgaacgtcttgcagtatatagccttgttgccgatgcatcgaatcaaacagcacatgaattgcccttgtttctcagttgatcatgtacttgtttctctgttgatcatgattgagaaacctaaccaggcaactttagaatttctactattgatctcacaaagctttggctgaaaaatcaactactccctccgtcccataatataagggattttgagtttttgcttgcaacgtttgaccactcgtcttattcaaacttttcgttttttatatttgcaagaaaaaattaaataaaacgagtggtcaaacgttacaagcaaaaactcaaaatcccctgtattgtgggacggagggagtatttatctgatattataattaagcacctggaatcgtaattcattacttatctgaaaattcttcgacattataatctgaaatatcttgcacttttttgcgatgctatacatttttgtaagtaatgaaatactcgatcgaactaaggcaaactgtctggaatttttgtccttttattttggagacgaaggccaacgtctaaacacttcccattattggccaactctcatgttttcggatgatgggccaactcgttagtcggcccatctcatctcaactcaatccaaggcccacacgacggcgttactcgacggcccagatttacccatcgcaaccgaatcaacgaccaaaccctaacacacgactcgcccaccagtatataacctcctcgcaagcgcaaactcgaaaccctaccttcccaaaccccagccaccgccgccgccgccgccaccaccgttgccgttgccgcctccaccacccgccctcgaccacagccatgccgccgaagctcgacccgacccaggtggtggatgtgttcgtccgcgtgaccggcggtgaggtcggcgcggcgtcgtcgctcgcccccaagatcgggccgctcggtctctccccgaagaagatcggagaggacatcgccaaggagaccgccaaggactggaagggcctccgcgtcaccgtgaagctcaccgtccagaaccggcaggccaaggtctccgtcgtcccctccgccgcggcgctcgtcatcaaggcgctcaaggagcccgagagggaccgcaagaaggtgaagaacatcaagcacagcggcaacatcagcctcgacgacgtcatcgagatcgcgagggtcatgaggcccaggtccatggccaaggagatggccggcaccgtcaaggagatcctcggcacctgcgtcagcgtcggctgcaccgtggacggcaaggaccccaaggacctgcagcaggagatctccgacggcgaggtcgagatcccctcagcttaagcaggtagaaacaaatcatcttttcttctctggttaatcgtgtatcgcattgctattttggatttacacacaagtaaagttgctagtaattgatatgaaaccttgcggtatgtgtaggtcactaccatgtgtccatgtttacttgtgtaattttggatttcagttgtgttctgtaagttttctgattgatgaataaaggtaatgtaggcagtagctgtttgccttctgaaattcaaggattgagattgctaagctaacttaatttgttatgtattgcgcacatgttgtttcttgattgctgcactttattatcctgtgctgattgtgacacacataattcatgtgcaggtttggcattggggtggttgttatgtgaggctgctgaagtagtttttctacctagatggttcctggtgcagtgcagagaatggaagcttgatctgttcttgttctgctcttgctcaagaagtaaacttttgtcatgcttaaagtggtaccatgtgagactttttttgccatgctatattgtttaccttgcgaaatcaatgttgttaatgcagctagatttataatattgagttttctttgcgatgttctgagtttttcgttatattgttgctactgcgtgcatgacaacaatgttctgagttttcgctctctagtcttggtagccaaaagcacttcttgaactccagcctaaattaaagtgccttgttatgttatgttgctgcatccaacactgatagatcaaccctaatcatgtgctcgctatctgtcactccttggtaaccagatacgaactaaactggaatactttcagattttgcatgcgatgctggaaattctgttccttggtaacctgatattgaacttgaaaactcagatttttcgtgagatgctggaaatttgttccttggtaaaactttcagattatgtctcccaaacctactatagtatttggccaaaataaaatgtttagacggtattgagttgcaaaatgttaccaaaataaaatgtttagacggtattgagatgcaaaatgttcagagatggcatctgcctagaacttgctatgttttactcaccgggaaacaagtatctcggatatgcgccccttgtctacacagtaaacttccaagagaatatccaatatgtggtctattcatcaatcaatctggcacatttgtgccaaatcaatagccatagagctttggcttaccctgagaaaacttcggcttcaccaggctcctgcacaaacaaccagctcctgcaacaatgtcgggtcagctagatgttaaacccgaatttaattgatttgctaaatgtcattctatagaaaacttcgagcaaaatcttacgaattttttacacttcaatccgttccacaatattgcgctacatgacctcctctgagatatttaactacttatcacttttagaccttacaattaaccatttgtcccctgaattctcatagatagtgatgtgataattaaccatttgtcccctgataaatggctaaacgtcaaatctaaaagtgacaaatagttaactattagcatgtgttcttacacttaaatccgttccacaaatttgtgtacatgaccttctctagccactttgaacggttaagcattttgatttggggtatgggtggagggtgacaaatagttaactattagcgtgtgttcttacacttcaatctgttccacaaatttgtgtacatgatcttctctagctgctttgaacagttggcattttgatgggtatgggtggagggataggaagagagaagggggaagatttggagtatgggggaaaaaattctctgcggcagtgtggcacgacaccactcttgtgacaccgagcaaactagtgacgcgtgtccaatattcctagtgcagccgagtccagctttggaagacaatatcggcttgttgtgcgtgcaaagagatagcgggagactaggtgagacgggggtgggaaagatgggggagactaggtggggttcacatcccctgcctttgggcataacggcaaactttgccgttcctccatcccaaacgtccatttcatatttacggctggattttgctggcccaacatacatcacctcaaaaattgctttcttctcaaacgaaagacatcgtcatggttgtggcccactatagtttcattttgttgcatgaccatcacgaatagctaatagtagcaatctagcacctacaacttcaagattttgcaacttcaagatttattatccacaatacagatcattagggattctttttcccagtggacatggaacaaatgaacagcatgagtatgatatcaaaaggaaacagcaagcgtttaatcaaacgatgtattgcattggagaagaaaagcagtttcttaattggaaaggcattatgttacgttacgttggagaaaagcaatttcttaattgggaagtctagcaaaatccgatcgtaaatatggaatggtcgcttgtgatttgaggaacggcaaagtttgccgttgtgcccaaaggcaggggatgcgaacccgactaggtgagatgagggaacaaaagagatattgtggaggcaaaggctaattgcctaattgggtgacagcggtgttagactagtctgtaggccttacaagcattagccgacaaggtgagacgacgacacaagagttggggggaggtgggaggcaacgacctagaagtgcgtctggcactccggcttggctatcgataacaaagagaacatgggtgggagggttatcgagtgtagtactttattctgagtttaatcatcaagagttaggcaatttggtttgagtatgaaccggaaacttggtaagaagctacaaccacgtaacccctccatctctcaatacttgtatttctatgagaaatgattgatgtgactaagtactttagaatgaattattttgggacaaactttaaactctagaagataactattttgtaggacggtcggagggagtacgtatgttatcacactcctacaaggtaaaactagtgttggaagtatagtgtattatgatacctatcagtgtggtgtggcatgcgaaactgatcgacaaaaatggttgagttaaataaaaaaaaacttttttggaagactttgttcaaatttcacctgttttcatcagttactgatcttactgacaaaagtgggtttggaggcagcacatttgaacacccttgggagaatttccatagggtttgagctggggaaacgaggggacccatcctgtagaagccaagcgataggtaatttgtaatttgtcgataggggaatagctcttttcacttccttttacattcagctaaaaatactactccctcaatcaaaaaaacaacctcgtacgggacatttcttagtacaacgaatttaaacagtgtaggatatgtcccatcctagtacgaggttcgcttttttgggactgagggagtaagtctgagaatgcattctagaatgtgcttaaagaacataaatatagacaacagcacgtaacacaccagtcacacaccggcacctacgccctgtttatattataaaggcataattatactatttttaaaaagatacctagatgtactatatgttctagtgtaaaatttgataggtatctaaaatttagatacatcaccatactttacttgacctgtttccgccgtgctcgctggtcaccaactcaccgtgactgcttcagcttgtgggaagcgcagcgcgcagccgctcggtgtagctcccagccggccagccctcaaacacaagtatacagaagaaaatccttgctgaaacaaggatcggtgatcactggaagcacatgtacacaagtatacacacagctgaaaaacccatgctgatcacacaaagcacaagtgtcaagtaagttacacggatcaatgtctcagcaactgatgaactgaatagagcacacgacgcacaagagatgcatctcagcaagcatcaccaatgtaacagacaggtcaatcaatctaacgactcagcaaacaggcagacagtcacaccgctcgctacggagttgatcctacattgttccagtagttaaattcaggggacattcagtcgtcgtcctcgccaaagtcagagccggcgaagtcggaatcatcgctgatatcctgcacttcgtcctcagtgtcatcatcgctcagctcctgcacctcctggtaactcttcttgttcccccgtgtttgccgtttcggcctcgctgcgactggctcggcagagctacctgatggggaggatgactcggtttcttcagtgctcgtggaagctgttgaggccctctgcaagacagagccgctcttcttgtggaagggagaggccctcatcttgcgcaccttcttctcaggagatggagcgctggtgctgctgtcctctgtaggcttgaacatttcttccatcactttctgcctcatggacttcccctgagctggcgccctcttcctggttgcagccttcggcttctcagcggcgggcttctttcctctacctttcttgaccggcacttcttccatggcgaaatcatcctcgtcgtcctcatcgatgggcactgtttcgtcttcctcgtcatcagatatcacagctagggatgatatggccttctttgctgctcctcttttgcttggttccttcctccctttcttcccttttgcctgttcttctgtagtctcagtttccatagctgcaagtgttgcaccatcagcttaaagttttgaaagtaacagagaaagagttgattttttatccacaaacacgagatgcattaccagtatcttcggaatggtcatcaagattgtaagcagccaatcggtcttttagagcaagaacttcgtcgtcctcgtcatcactcaactgggtgcttgcctatgaaattgtcaaattgaattgtaagagcgataaacaaattatcacacacaaaaaaggtagaggtttgccggagggaccaaccttcttagctggctgcttcttctgtgcggcaggtttcgggattgctgctatataatcttcatcctcgctatcagccaaacttgcctgtatgggttcaattcctatatcgttaaagatcatcatataatacgtgatgcatcttaataatcatcaccattctcacctttccagctggtttcttacgtggtgccgcaggttttggaaccgccggagcagcggcattccctgcaatggatgagcagacaatttagtactagaagaatccatctgggccatgcgaatagaaggaaaaatagataacagtaccgtcagagctttctgccgcctgagtattagtcgctgtctttctaggtcgtctcttgggcgctgctttattaggtgcagcgccacctccagcattcctcgtagctcttctctcctcagcatccatgctgtccttctcatcaagcgcctgaaaaaaaaatcaatgggtgaaaggtgaaacataaaacaataaacggtacgtcccacacccaagagtatcacagcttacatccagttccttctcgaatgcatcaaggtctctcatccaaagtgattttggccttgttctcttcagttcagctacttcattctccattctgcccttctctgcaatgagctgttgtaccctctccagagtcaatgtaccaattgccattgagaggagatattcataatcacttgaaccaacatttgcagcttcagggctctcctcattctcttcatcctcttcaatagctccaacagcggatggcccagccctctgttttttccttgggaaaggatcaaatcccttctgcttaagctccacaaacagctctgccctcttcctgttattcactatgatatctccttcgacaacagcaagaataaatctaactttgttagaaagcttctttaactccagttcaatattttccaataatactcgctgcacaacaaaagttagttagtgtggtattatgttgctaaaacaagatagaaaatgaacagactataaagatatgtacctttcttttctcgtagaactcgagcctcagtccaaagaactctttaagtactggaaagacataatttcagtgagaaactgaaaaatggagcacaacaacataattagtatagttatacttactgtcctctggagtatcgtacttccgaatttttccattagagtcaaataagtgcatatttgttgtaccaatcgtagttgtcaacttgaacttcttctccagcccttcttgcagagctatagccatgttttctttactcagggtaatcagaaattccacattcttgtcatcactataagtatcgaatgcctgtaaattgaagaacacaacttaagagaagatcgctggtaatcggagcaaaaaaaaatttgtgcaaaaaaactacctcgataaaaggttctatgtccttctccttcttttccttctccttgaccttacccttgcccttgcccttatccttgtctttgtccttgctcttgtcggttccaccaatagatattaaaaactctttgtaatcctgagaccagcgacggattggtagctcagtaattctcagcgtagtgtcatcaacaacctcaataataccagtgacagtatagctgacaccacccgcttttgtgcctgtcttctgaatagagccctgttgttcatgaaaacagaagttgcccaaatgcaatcattagtttaaaatagggatatacgctgctagtgtaacagtactctcagtcaacgcatattactgaccttgaaccccctataccatgggtccattggttcaacaggctcatcatttagcaaccgtcttagattagcaacaatatctcttggattatagtttgggataaaggtgctccatccagtgccaatgccttcacttccatttaccaaaaccatgggcaggattggcacatacctgaaggaaagtaggcatgtgttatgtacttatatcaaactatctttaaatagtattctggagaaagaaggctccaacagctgatattaccaggtgggttcaattgactgtccatcttcatccaagtagttaagaagaatatcgtcatccttagggaaaattgaacgagtgataggcgacaacagggtgaagatgtacctagcactagcagcatctttgcctccctgaaatgaatacaaacaagcacagtcatgagaagattagtttacaagctaacaaaatagcgaccccacaaaacagcaccgtaaagtaaaatccctttacaccgttgtcacacctgatctctggtgccaaattgaccattgggctgcaagaggtttatgttattgctgccaacaaaatcttgagccattccagtaatggtactagctaaactctgctcaccatggtggtacgcagagtgttctgatacataaccggaaaactgtgccacctgtggtgaatagaattaacagtgtcagtttaagtatattttatcatctcaaataaaaaagtttcaaaaaacttccaatggcacaaccttaatttccttaactaagttcctcttgaacgagcaaaacaaaatcttcctctggcctggtttaaggccatcgaccattgaaggtattgagcgcagcagatccgccatcgagaattgtatcagttccttgttgatgaagtcactgtacttgatgtacttaccttcggtatcaagatgggttccagactgaaattttgattatatattagttgctacagaatagtaattaggttttgtaatatggaaaaggatgcaagagcaaacctgaaagttagtaagccactctttcctatcagtaattcttttcttgctgaatgccaattcaatatcgttgtcatcttggtcattcttccagacaaaatccttcttgtgcttggcaatatcctggaagtactgccgaccctcagaggaagtgcttgttccaagtccctgcaggcaccagtgatatccttagctgatgacatctaacacaagaaaaatatacaatcgtgtgcagaaagccgaacaaacaacatgtgattcatcaaagggagaacagaccttgtagtactttatagaccaaccacttgcatttcctccaaggctctctttccattgttcgtactcaggcattgagtaaaatggcaggacaatctttttgtcccttttgttggtggcctgtgcaaatatgttcaagaattattattccgtccaaccaagcatgctttaaatatatgtaacccacagaaggatatgactccttcaaatgacaattttaagtacgatactttgacaagctgtaaacacagaaaataagcatgaaatataccaacccctaggagctgcctaccttgataataggagtaataaactcaaccaagaaagaaggaattttaataagagaaggccagaaggagtgaatgaagttgatcaacaggcctttgatgtgggaaccatcatggtcctgaaattttctattagatgagcaaaaaagcgagttgagttagactagttgaaatagattttagcatgagaaaaacctgatctgtcattatcatgagatggccatatctcaagccttttgtgctatcatactgcttcccgtgttgcaacccaaggatttgctttatattctggatctctgcattctccatgatctgcttatgacttgcttctctcacatttaataattttcccctgagaggaaacacaccatagtaatctcttcctaccacagaaataccagccatctgcagaaggaaaaaaaaggaaactcttcactgatactgaacttataaactacctttgttggcattatgcgggattttactactcacagctagagccttagccgaatctccttcagtcaggattaatgtgcagttattagaatccttcccaccagcaccgtttgcatcctcaagcttggggatgccggtaagtcttgatcgcttgcttccatcagtcttctgtagctccttgcttagtttgaactcagcccaagaaaggagattgaggacaatagctgagctaccaactgcaattgtaacaagtgaacatcgccattaatggtggaactacatttgaaaaaccatgttaagaacagtaaattgatcgcatacccttcttaaggaaatcatcagaaagttcacactttgatccaaagcttgcctgacgagtagtcaaggtctctttggtttgtgaatcaaaagctgggttgtcaatgagtgcattaacaaagacccataaatggctcttgacattatgtgctttcatgtgagcattcttgttcctcttattaacaatgttcatcacatgggtggcaatttggttagtgacatagtccacatgagtgccgccttttatggttgcaattctatttacaaagctaacctgtatcacaaaaaaaaagtgtaaggtgcaagtgtgaaaacatatcctgcaagggactctaggagcataacgcacctgctgaaactgcccttcgctaagactcacacacacctcccaccgatcatttactttctgtgaaatactgaaatggaagacatgcgaaagaggaaaaaaataaacaatataagagcatggacatccaaaaataattttgcgttgcaagaaactactgtcaaaccttgggagttcattgacatcgtctctgtccttggaagcagacttgatatacagtttcacataatcagagaagctatgtacaggcaccttttgatgatccaactcaaccttcacagttttgccaagagtgcctgccatatcaaccactctcttcctcatgagggctacaacatcattttcaagatgggtcatgttgaatttggcaaggtcaggcttgaacgtgactctggtccagttctctccttgtttgcacttggtaatctggggttcagacttctttcccatgttttcagagaaaacctgcaccaacaattcaatggtacgatttaaattatctatgaatattgcatttatcgtgtgctgtgatgttattattacatgatctagaaatggtgtttatcatgttcatcataaacctaaacaatggtagaaaaaataacccaaaaactctgattcaactctagatgttcagataactgctggagtaaaaaaaaactctgaacaacatggtgatatacagaagaaactaggaatgcccctaaaaactataaattatttttgttcaaccaaacattacatggatgctgaactacaaatctgctaacattctagtctcaaattccaatacgaaaagcaattaactgggtcaccgttccagtatctcattcatctcacagatccggtaagagaagttcatttctaagctaatccatcccccagatgtcagtactaactaaaatacgcaaggggaaaaaaactctggaggaacaaatgaatttaacctgcttgtacttcttctgccgacgtccatcggcggtctcaatcacgaactccgtcgagaagatgttggtgagcttggcgccataaccattccttccgccggtggtcttcttcacgttgtcgtcgtaattgctactggtgaggaggtggccgaatatcatctccggcacgtaaacgccctcctcctggtggatctcgacggggatgccgtcgccgttgttgtagacggagatgcggccctcgtcggcgtcgatctcgacgcggagggagtccatggaggggtcgcgctgcttgttgtcggcggcgttgacgagtatctcgtcgaagatcttgtagaggccggggacgtaggtgacgctgcggctcaccatggcgccgtcctcgtacacccagagctgcgcggtgtgcttctccaccgagccgatgtaggtgtccggccgcaggaggatgtgctccagctgcgtcttcttctggtacatctcctcgatggtcttgccgccgcccccacccgcggcggcgttgtggccggagctcgactggagcgggagcctcgcggcggcggccgccatggcgacacacagaggttgtgtgcgccgctagggtttgggtggtggaaatggcggattggggaattggggatctggatggatttagaatggggatacggggggggggggggggggggggtttaagttgaagcgccgaggccgacgagttcgaaatttgaattttgggtgggggtcacgtggcggactgggggaaccaagggtggagattgcggggcgcgttgatctggcggtggaaattgaactcgtgcgtcgagagaggtttctggattccgaggggcaggggcagccgggcagggcagggcagtgtggaccgtggtcagctactttgccccttttttttcactccgcttggataagggaaatttagtttgtgggccctccctgtaagaaaaccaaatcgaatcgttcaaagaatcaagaacatactcccttattacaacaaatctaaacatacctctatccgaatttattgtactagaatataccatatatagttctagattcgtctttttcgaacggagggagtatatactggtataaacattccagtaaatattgtaaatcgatgcctgtgtgaaaaaacttagggggtgtttagatccaccagtaattttttttgccccgtcacatcgaacatttgaacacatgtacggagtattaaatatagacgaaaaaactaattacacagtttatatgtaaattgcgagacgaatctttaaagcctaattgcgccatgatttgataatatggtgctacggtaaacatttgctaatgatagattaattaggcttaataaattcatctcgcagtttacatgcggattatgtaatttgttttattattagtctatgtttaatacttcaaatgtgtgttcgtatatccgatgtgacgccaaaaaatttcacccctaaatctaaacacagccttagtgtgtgtttagttcacgccaaaattgaaaatttgattgaaattggaacgatgtgatgaaaaagttagaagtttatatctgtaggaaagttttgatgtgatggaaaagttggaagtttgaagaaaaagtttggaactaaacaaggccttagaataaaacaactatacataaaataagtagtcacagctactatccatgtctagaactaatggtttattcactttgatattaaaattaacccttctaaattttgacaacaccaaaatttgacaaagtttgataaaaacaactttttaagtagggtagaggtatgtgggtgtttgtttggtttgctatcatgccaaatattcttgtatggtgttatgtggaaaagtttctagaaaatcaccaaaaaaaatggtagagtaaagtatggtggagtactagagtatttggaatgtgtttaaattgttaccttttgccaaaatttggcaataccaaagtttggtgtggttgaaaatgatagcaaaaactaaacaacttctagattatcacagctgaaaagcacataatcaaaggaatgcaattttgcattttcctttatttctatcatagtattaggttgtgattgaatgattgtttggttggctgatttacaacaaccaaggttcaatttgtaacggattattaaccaaattagagtactggattatctatatgttttatagatatgaactagatattttgatcaataaacttaacaaatatcaaagaatgaggtatcaaagcaatactgtagcatgcagcttctatgagaacgtatttttaagaaaatgtggaagaaataaccagcgacaataaacatatgaggcaccaacaagtggtgtagctagctggtagtacatgtgggcgcgggactaccctagattttagcctagagaccttaatccctactatcaaaataattttcttaggccacaaagtctgctaaagcacactttgatatttatactcttaaattgatttgctcttatttaatctttaaaattcatggatcatttgcaaaacgaactatacatactgatatatcatgcttctaaaactagttagtcagcctgacaactctagagtgttatatatttattattgcatttttgtcaagttttgtcttttttatcatggtgtatcttgcgatggtttatttgaattaggtggtctttaacaaattttgtaaatgcatactattagatagtatggtgatattgaaattgtagtataagcaggcacaaccatggacaaattttgtaatattcatagtataacttgtttttcatcgttagatttgctatctaccaggtacttggccactcctaatctttttcatcatccgtcacaggaaatataaccagctaaaaagggctagatggttgtttggttggttgcgttgagagtagcatcgctaggctagttctcgaacgaaggcatatgaagcctaattatagcatttgattttagttgggcatccaataaaatcttgcatttttcatgcttgaactcaagtgatgctccaaggaaaaagaaggtgagctgcaactggccagctggccaaaggtcagcctacccatccaattacaacaaccttaatcactgagcgttgttatccttttagtaaatcataagagcaggtacaatagtatgctataagccagctataaatatattttaatgggataaagaaagagagagaggagcagcgggctacagatctagtgctgtcaaaaaagctcgaggctcacgagcagctcgagcttggctagtcttaggctcgattcgaggtcggctcgagctccaaacgagccgaacccaagcctgagcaaaagctcgcaagctttactgagccgagctcgagcttataccgagctaaccgagcttgattgtgtatagtttatattgcatgttcacattattgatataataaactaatagataaatatatatattagtatctatttacacaataaattagcatgtgttagcacaatatatttattttagtcattttctactcttttattagtgtgattaacttaaaaaataattatacttatcaagagattatcattaaaatatatattatactccctccatctacttttgatagtcatatttctaaatctgaaaaatttatttttgataggcatatttcaatccaacaacctatcatcttaatgactttctcggatttaacgcatgactctccattcttccacacatgattggttatatgggtattgagaaatgtaaatattaatgaattgcttgtttacgaggaatgactagtagcatgtttaaatggatgataagtagaattacttatccttggtctgtgtgccaagatgaaatatgactatcaaaagtagatggagggagtactacttatggccgagctcgagctcgaagcgagctttgcctaaaagctcgaaggtgcaataggctcggctcgagctcgagcttagacagacaagctcgcttgagctcggctcgttgacagccctatacagatctgtagccagctgcagcacggactccaagacgtaatgtgtgtatgacagatgtgaccaggtattaatattatagtagacaactattgtatgaattggctattacattaactatagatgatttggagctagtaatgggctatactattaaacttgctctaacatgcacaaatagcgcataagcaaattcttagcatcgtgacatacttcacaatgcttggtaaatctgaagcactttcaagctggtttcatattgtaagactttctaacattacccatatttatatagatgttaatgaatctagacatacatatatatatatatatatgcatagattcattagcatctatataaatgtggacaatgctagaaagtcttacattgtgaaacgcaggaagtactaactagtatcgagacacgaaaatgttccaagtagagttggctattaaacgtatgagcattgcttataacttataagctcttcgacgatgtaactcaactggatctcagagtaaataagtctcgatgagttcaaagccaggctagaataacttacagaaaagcaaatttgaacaaaacatgcaacatgcttcaatatccgcacatggtaaaaccagcccctgttggcgcctcgtggagaccttggagaccaggacaacctcgcaggccaaagacttccacattccccagtcatctcgtcaaggcccctaatttggacgtcagtgaacgggcgcatcacaactcacacgcacggtgttgcacgcttcactagttacactacacgagacggacccaaccattgtccggccatgcacgcacggcctttcttgttcgtcgtccaagcttgcctccgtcgatcatcgatagagcaacgtgtcgacgcctgcagcagcgtcggcggcggtcgacaccctgcctctgccgctaaacccgaacgttagctgcctgaatgctcccctccccttcggcaaccgcacagaggccaacggaaccggactcatggaccttgccgggacgccgttcgccttctccgggaggaacacgctgatggccgtcggctgcagcaagcataaccacctgcgccaccgcgtgccagggcagctcagacgccatcgctagccactcctgcagctcacgacctgagcttagactaggcaatcggtaacaacagcagcgaggaagcaacaagaggcagcagcaagcttgctccaccggataaatgcaaggcgaatgcttcgactcgctcggggagagggctgtctctgcaattgccgtcagggctttgagggaatccttacctggatgtcgggtgccaaggtaagcgccttcttttcagacatttgcattgcaccttcagatatatagatactcctacttgtttccggagctggaagaggaagaccatgcatggaaagaacctgcaaactcaatagtattatatataagatgtcaacgagatgtactttcgtagtagaaatctaggaaggctaaacatgaaaaggaatctatttcaggggaatcacatgtaaatcaattttaaggtgtgcagtaaatcctagattttgtttagcttgtgctatatcttatctactacctactacctaggcgaataagcaatggaaaatccaggattcagattaatgctgttctatgctaccagttatgctatgataattcaactgattgcccttcactgtctttacagtggcaacttgtcccagctggactaaaggacctcatgtagttactaaatatctccagttttttcagcataactcttctgaagttttgatctttcatgaaactaatgttaaattatccatgttattactagacatcaattagtaccaacttccgccacaaaacaaggattacccttgcaccttcacacagtactgcaacaacactccaggaggatttcagtgctcttgcccatcgagcatgattgataatggttacaggtcagggacgggatgcactcccttggttttagttccacctccacctagtcctggtacttcctgtatatcctgtttgcaactttgttcaactacatttgtcaaagtcaagtcatttacagataatagggtatatcatacttactaagaacttattaacctagtcctggtgtttactgtacatcatacacagtaagcacttatgatgcacttctacaaataatagtgtcgagtctaagtgatattgcatttctgtttacagtaagcacttctacaaaaaatagtgtcgagtcttgtgatattgtattcctgtttacgcttacacatttgttatgttatttaaacaaagaaaaaaaaactccacaacacttcagagatagaaattattttcaatgcatgacatcaaggctatcagtattaacaacgaggatcaattatatatctattaggcttgtcaaagttgcataaaaaaaggaattgtagtatctagaaataaaattgtcagtgaaattcagctagttctaacgaaaagatcgatgacatgcctatcaacattcaacagacacatcctgtccttatccttattccaagttactggcattattttgattacacttgcgtctagattatcgccagttctgactgtctgcacatatatattctcaaaaagatatctcaattaaaaacagttaggcttagaaatagtactctccacatgattaattaaatagctttgattaggcatgacctacagcatcaggaagctaaaatatgttgattggttcctcttgatgcaggttcccccttgcaacgacaaccccaaggtttgacatatcctccaaatctattaattgtgcatacaatttagcatttgatggcagccttcaggtcgaagttttcttttggcaactatttttctaggacctaaagcatgccacagggcataagtggagatggcatgactaaggggaatggctgccaaacgggtcgaaagaacttccccatcactatggtaactcatcagcttctggagtgctacctttatttttaacctaaaaaaactacagattctgaacaaacagttgaaaaaaacataatatctacataagctattgaatgcaaatcgttttgtgatgttcatagcagagtaactgatgcataacatttagctcatggcatatgttgaatattacagtccaacaggtcaccatgccaaatctaaaccactgaatcgtgctaaatgaacatgaatctgaaattgaagaaaaataaaataagtcaaaaaaatcaacatatgcacttgatagtcaaaatgcagaggagttttacctgtagcaaactcatgcacctcgatctgccgcaaagcaatcacaagttgcagcatagcctgcaattattcattgttgtcaaatctcattagcatcactatagtctgtgtggcacattccaatgagaaaaaaaaaacttgttatctgttccaacctgtgcaggtgctattatcgcactgccagttacaataaccacgacagcatcatgtatctactggagttttaagaaaagagagagaaatagaaaaagagctgaattgttcaagaagaatggtggcttgctgctgcagcaaagatttgctgcattcacttcccaaggcatgatggacttgtcagcaaggctatttggtgcagaagaactcaaggttgctaccgacaactacagtgaaaatcgaattcttggccgaggtggctgaggtatacaaaggcattctccgcaataagaattccacagtgttcacagtgttcaatgagagccaggtggaacaattcgtcaatgaaatttctatcctgtcacaaattgaccacccgaatgtggtcaagctcttaggttgctgcctagagacacaagtgccactgtttggtatacgaatttgttcctaatgggactttattacagcatattcacagccggaatgctcattgctcttgcccatttgcaatttgtgccttctataccaattgttcacagagaataacatactattagatgggaattatgtggccaaggtatctgactttggtgcatcaagatcagtcccatttgatcagactcatatgacaattgttcaaggaacaattggataccttacagccagctcacagagaagagtgatgtttatagcattggagttgttcttgcagagttactgactacagagaagccagtatcatttgccaggccagaggatttgcgcaagctagccatgtactatttggtaatgttggtcaacaaaggttgcatacttcaagcagtaaaaccaatcattttggcagaagccagagaagagcaactatatgatgttgcacacctctcaattatgtgcttgagtctgaagggagaacaatcaacaatgaaggaggtggcatcagttcttaatgggctgagaaggtcactggccaaggacaaagctatcaaaggaaaagaagtgtacccacaaaataagaatgaagaagaggaatacctgcttcctggatcaggggtaggatcatcctccactctccactcttcagaaggaagtaggcaatgtagcatggaagttgaaatgatagcttcttgccatcttacaagatgatgtacttaatgtaatcttctaagcaaatgtatatatgttgattgaaaactcatacatatgtaagtgaacatatagaaggtctcataaatgcagtaaaaatgatttgcagatcagtagttttgggtaaaagagaagaagaaaatccaactaatccaaaaagtcaaaaccataaaaaatattgtggactcagcatatgcagcattttcctttcaaggaaatgagaggaagatcaccacttctctttgtgcctgtgattaccccccccccccccccccaaaaaaaaaaaaaaaatccttatgtgctatcctatacatcttaagttaaggtgtattgattctcaacttaaaaatgcatatcgaggataatgatatttcaatcagtgataatcatcataaaaacaagtaatcaacacacaagtgaaggttttacttattgttggtttattgctctagaagagacataaacatcgtgagatattggagtgaacaacaaatggaaaaaagattagctgaaacagggccagtatcatttaccatgggatgtccatggacagcattatagtgttatccatgtcaatatcattatggcctaaatttgacttctaatccgcaaaaatttgctcctgatagttctccttgctaagaaattggctatcattgccatccaggatgctgtctcctcagctttctcaactccttttcacacatcaagttcaattgcaacttctacatcctcggctgtcttcccctttagcctcgagcatttcaaaaccaactgaatgtcagcattaacatgcctaattccagcttccttaaccactgcactatcgataatatccaatattgattctgctgggcaagtgaagtaaaacgtgagcacatatttcccccttctggcctgtgataagttataggcttttcccttgtatttgtaagcagctcaacaaggaccacatgaaagctgtacgattcactcttatccgtttaacaggcttgtttcaaagcgctcaggatctaagtgtcctaatgtcccttggcccttgcactagggttgtcagttgttggccaacttgacaccccgttggaggactggtacatttgtagctagatgaagacaagagagtgctgatgcagtttcagttgctatccataaacgatgctcccatgaaatcagtgtcaacttgttattgtgacgggtacgggataccatagaaggtgctggtacttctagttttttggatggagctttcagctttggttcagttttttgaccaagcaacccttcttcttatcctacagcatgtgacgtcaatttatcatctatttcatggagcaaacttgcatagttgcatagagtaccatagaaactgaccgacggcacaggcacagttctgaacgagacgaactactactcattattaaaagggttaagacgacaactggtggactcatgggcctcgagtgcagatggccggcccaatacccatcaatactttccatttaaaaaaaaccaaaagtgcagcagaaaaataaataaaacataaactggacattccctcaaaaaaaaaaaaagacataaactggacatggcataaaaccaccggttggaacgatctgacctctagggtttttgaagatcctcgccgtcgccgccatgtatgggaactccggcgagggccccccgtgaggcggccggacaccttccctgcatcctccaggacgcggttagcagagtctccaccgcccagatcctccactcgtccggctacaccgcggcggagccagccgccctccgcgccctctccgacatcgccgggcgctacgttgcctccctgggccgcgcggcctcggccatcgccgaggcccgcggccgcacggagcccaacctcgcggacctcaccctcgcgctcgaggaccacgcgctcggcgggttccccggcgcgtccgaccccgcccgccccgtcctccgctccggcgcgctctcggagctcgctggcttcgtccgcgtggtgcgggaggtgccgttcccgaagcccgtgccgcggaggggaggggccccacgcggcaaggcgtgggagagcttcgcggcggcggggaaggagcctccgccgaagcacgtgccgcggtggctcccgcgctttcccgacaagccggagccggagcccgaaccaaaggcggcgtacgacgaggcgacggcgaggtgggaggcgcgcgttcgccacgaggaggaggcgaatgcagaagaagcggtggtattgaagccgagcgttgatggcggcggggagcgcaggggagtagtaccggagaagagggggaaagtgagcttccgcgtgcgggcggagaggaagaagcggcgggtgggattggaccagcagtgaggcggtggcttcgaacggttcgcggagaatcgagaaaaatccgcggcaatagtgcgggcggcgagcaaccaccgctcggccgtggccgtggagaatggagatggacgacacgccgcggcgttgcccggtgacccctgtccagtcgaggggttgaagaagacttgacgagttttgggctctgcctgggccacacgtggcgcctataggctactagcccacgagccacctgccgtcgtggctgaactggccgaaaaggtcaagtgtgtgggtgattgtacaagttataattgagttgccacagtttatcacaaattttggctttagtttgttcacgcggtgaatttgtggcgtagagctggtggtttcaaatttcacagtactctgcttgatatactaaaagatcaatttcttgttttttgaggacgtctgagatcaaatccacatgtatccctgaagactccctcggcgattcattcgatcatccctcctgagtcctgccttggattcgtgatttctcgtgggttcctcaccgtgagattcatcattttcatcttcagatcttgacttgtggagacgatgaactgggtaaccgagattcccatccattaaacaagaagaatcccttgttgaaattaaagcaggaactgagacaaagatgcaaggaggaaaggcaacagttcagagtgctttttgacatcaacgggatacagagaaaaactacattgttaacatcaactggtgtaatagttatgatatattacatcgaattgctacacatgcttataaacagaacatacagtcgaagaaactattaattctttggacagtaaataacaggcaaatctgaatataactgaggggattatacatgacatcagagaaactatgaactattgactatgagatgaatgcataagattagctaaatagacatcctaaaatgctgaagttagtactttacaggagacagctatgccaaaagccatttttatagtcaccaacactgttgctctgcaaagaatttcccctccatggagtcattggctcaactactgtgtgagaaccaagaagcactcgtgatgagagcctaaagggtctcaacctccagttagaaatatacaggtgctgttgatctttacatgtcatgtcaccactgctaattagttatcagctgttcccaagttatattgaagtaaccatgccatttgctctttactgactgtagcccaaatgactgaaaagcccgcatcttcgattagctgggaatgtacacgaaacttgcaggtccaaggctagcaaatcaacaccagatacatttaacatcacagttgacgcctatgaaggatctcgcaaggcaggactagccattctaacacggtgagcaacagccaggggcggcctgccaacagcttccagtatcctagtaaaggcaaccttcgcagggacacatgtgacaagtggaattccccctggtttgatcaagccgccaaaaatgccactctgcttatgtgcttttgcttgaccacctactccatgatgcttttttccagtggaaatggaagagagggttcggaccttctggcttgacaggcttgcttttttggattgcttcttttgagatttagaggctgacggcctcctaacatttgagatgcttttcttatcaaccttaacctgatgatttgaatttgagtactttctaaaatctgaatttgagtactttctaaaatctggtttcatctcccagtctggatatgcaagggtaccttcatcatcacaatccaatgcccctgaggggttagatcggggaattctttgcatggcagtcctcctgcctgtacaccaagcaggttgccctccagttctcccttccaaactaacatcaccacaaaaaaccaggtggtcagtggaaccatcttcaagtatttcaatttgaacaggatgcccaacaattgctttgccattcagtctgctcattaaggaaacaagaggaacatgctctccctggtagctagcctggaccttcaagtcaacatcaaacaacattgggcccctgccacgaagacgtgaactgtacttttggtagaatgagggtccgctccaatatgcattccgatcaaaatgaaatatcttatctgaatccctgtttaggggagaaaccttggaagaatcatttccatagtcgttaaaatagctgtagcttcggctaaaatctcttgtagccttcaaacatgaagaatatgttctaccatggtacaagttaacctctgaatgacctgtgtcctcaaaaaaatctgtttcttcggaatcgtaattgacctcttcgttttggtaaaaattttgccccagcaattgctgattgggaatttgcatactcccttctctgggatttctaccatttattttatacggagatccttccatgaaaccatctgatttgtctaaccagggatttccatctgccatatccgatctcttaggtgcattacggctattacgtttacctttcatatgccattgggagacgcccaactcagaagagccatcctcttctgattcattcacttgacacatataagaagaataggtcagctcatcagcatcagcatcaatattcgcatgcctgaacttgtcagaagctggtaagaaataaggatcatgggcatgtgatgctggatgcagaatcaaatccgaacctgcccaaaagatcaccacagtgatcaaacaagccaaaatcccaaactcaaaataaaacaagagcatagccatgaaaccatagacagaactgatgaaagcttagctagagctaaacagaaacaaaaacaaaggtacacttaagataatttgagggattatctaaatcatttggctatctcctttttcttggaccaggtcacacctcgattccaaatttggcaggattcattgtacataaccaacataagctcagataagtccttattgtcatataagttcagaataatagaatggctgctaatctgtcttataatatactgtacacaactaaaacttcacaacaaagtaagtttggttaaacccaaacggtgttgttttgttgtctcacaacctacatattgtttgagtcattgtcggttcaaaactttttaaaaaaaaagggtccagaaatgtttgggcacctaaaaaacaaatcaagagtgagcatatttgattactttgatgctatactgtaagatataaattgtttgaaccttatgcaacaacaataatatggtaacatttttcgcaatgtgaacccacgtgtgtacaagtaaaaattgaaagaagtattagcatggtgtgaacacatacattgtaaaagttcagcgtcatcttctgtctcactctcagagcattccctctctgaagactcatatatgtgcttctcaacaagatcagaagatgtctgctcctcagaaaaagcaggatgatgaagataactttcagtctcaaaatcacctcctgtagaagccacttgtacggaaggtaaatcactatgactatgagtttcaccagaatcagtaggtaggaatacatatctacttcttttagctcggtaattggcaggtgatcgatccatttctccctgagttaggacatccccatagccatcattgtgctgtgactgatgaggcaattttggactgctgtgcaaaatctgaaccagaggttggcgtctgtcacatttttcaatagattcatcaaaatcacttccatctgatctaatcttttccgcagttgtgattttctccttgctatccaaattttctccggcctgtatatgcctcacatgcgagatgtctcccaagtgattgccaaaaagattatcagaaatgccccgagtaggagaatcttgaaagtttctctttgagccagcatggaggacatattgctcagcttccttttttatatcagaagaagcagttatgcccttccgtttcttactctttttgctcttgtagcgggtacttccaagatctttgttatgtttagagcaaactgcatttcacaaagataattgaggttttatatccaacatactcccttgaagatcatgcaaacaatttagtcaacaatgaaggaagctaaatcaaactttgccaataaatgggcttaccagaaacgttagcaggtctggaaccttgagtctgatgctttgatgcaagcagcttcttctccaattcaagagcatgaagaatagcatcttctctacgtgcatacttctctcttttcttaacagaagtcccttcagtagcctctgccttctcaatacatgcatcaaactccccacacctaaatgctttgacgcgctttgatttttcaatgttgtaccagtcgctatggataagaaaagacaagtacataagtttcagaattcaaaatatacataggcaatcatgtaaccaaacaaacaatataaatgcatagtgtgactattaattcatgagaaaatagtgcaggtaaaatagaatcagaatgatttctaaaaggcaaggcaaacatttcaccaatttacataaagtcaaagttatttcccaaagaaccaccatctgtttggtttccacatagcaaacatgcaaatttctctacagaaccaaaatgctgaacatagcaactgtatagcaacctcaggaataaggaagcaatcttataatcctcctagtttattttcagttcttcaagaccaaacatggtcacactgaataccatgaaaacacatgtttagcttattgttttttttttacaaggaacagtttgcaggttatcagttgcagaaatttcactacacattttatattattatacattacagatataagttctttttcttttttctcagaatttaaacatcgaggcacattaaaaaaaactgacatggagctaaactacaaaaatagaccattttatgcacacagctatacacagattgcctctcgccttcttccgtccaagtttcaaacaactaaattactgaacaggaaaattgcatagcatctcaaatgcactagaggcagcaactaaccaaaaaaattacctagccatcagcaacagaagtagaaacttggaaacagatggaaaataagggaatcagaactcacacactggcatcctcacggccgagaagcttgaccggcgtgccggaccttggcgacatgatctgcgacggcggcagctcgtcgggccccagaatcctgccgggccaccatgacccgttcctccgccgcacccacacaatggtccccggcgaggtatccccaacgccgcagcaggccacctccccgtctcctcctcccccctccgagcaccccgccatccctcccccggccaccaaaccaagccctaaccgccgcctcgcctcgcctcgccttgcctcaccccgcttctagaagcttccctccctctcgagatctaccctccattcaaatcacggagggcgcctgcatctagaagccctctcctccgcgctcgctagatcgccctgcccctcgcgctcgctcagcgccccccccccccggcagcttctagaagcttctcagcgaggatcccaaggagagccgccgccgccgcctcctcaccccccttccccctccttctcctcctcctcctccacctccgcgaggcagggcccctccggcggcgccgctggttcgctgccgccgaggcggtcgccggaatatttttttccctcctctttctacgacagaaaagggtgggaaattaaagggcaaataaaaggattattttcttttttcctttcgggtagtagttttgttcttggttcccggtggtccgttctgcaagagagagagagagagagagagagaggcaacggaacggaaggtaaccgacgagtcgaaccaccgaagcccggaaggaggaggactgcgtggcgtaaaacatgagccggaatcgaatccaaggggcgcggacggcgcacgttacgggagcgcgggggggagtccatggcttccatgtgacggagtcgcgtctcgcctgcgggttttccgttctcgggcttgattggcacatgtacgcgaacaccgtgcggctgtacgcctgtacgtaagcacgcttaacgggtgtgagttttgagggacatatagctacataccacttttaagacgtggtaattaattatttatcactcatatagctatatgggctctcatgtgtccatgacatgtaggtccaatgataaataatttattccgagttttgatgatggcatatgggcatgtctaccaaatgttccggaaatatttgaatgtgtgtcaatggattttaatctagcatgtatagtacgttaaatattgtacaattataaaaaaatatttatttgaagttaatattgccaattaaattttaggggtagagtagtagatgtacactgaaattaaattaaacaacaacacacagagtagattctaagtctatcgtagttatagctggatagaaacactgggattgttgttttttaaaaaaatagttacattggatgggcaagggaagaggaaaatggaaaaaatatgatatgtgaaggataagggtaacattgatattgtaagtaaaattggttacgatatggttttacataacatcaacaatcagattcccataaaaatatgttagagacaatagataaaaagccacatgttgtttcggaagaaaaaaaagataaaaagcgacatgtatttttttatgtagggaaagatgtctgtcaactatcatggatcctaatacctagtgtgccttatgagttatggtggtcattacactctaaaaatctaaggataaatggggatcaagaaggtgcaatcgcgaacgatgatgtactcaagtagctacaccactttcgcactgcaaactcaacttgagcgttatggttgtagaatgaacacaaagttgtcccgcttaatggaatttagaatgctgatagattggtcatcgttggagctctaatccagaagctgcaataattcttagttatgcaaattggcgatggaaaaataacattattttgccatgatatatggttaactgcatctttattggcggaacactaccttgcactatacttgcatgcaacatctaaacacatcatagcaggtacgtccatgagacaatgactttgctcatctataatctccatgttatcatctatggcaattgactaatagtcgtaggctcttagctctaactagaaattgtagatgtgcgcatgagtcgtaacaaaggatgatgatgagacacaatgtgccacatgatgctcccatccctctaaatttatttactacaaatgtagggtgacaatagaggagtgacctaactagttagcgatttatatgggataataaggcggcgccaaaaataaccttcttgtatggttaatgtcaaaggagcatctccctatacaataaatctatctattccacaacaaaaatgacaaatacaaacaagttggatggtaaataagagtcttagcatgagataaatcttatctctactcaattcaggtttgtccaataaaatgaatttatctattcttaaaaaaaatgacaaatgcaaacaagtcagatggcacatagtcatttttcactgtaaaacattttccctgtaaaacaccggcccatgggacgatttaattggaatggcccatataaatggcccataagttgcagaataaattccattaggcccatatggcaaatactcagacgcttggtcgtcgagccagcctgctcccaacttttgggctgcttcctgcacattcctcacatgcgcaagccctaaagcccataaagcccagcgcaagccctaaagccagcaacggctaatttctcccctcctcatcgctgcgcactagccgttgcgacttgcgagttgcgatcgccgccgccgcccacctcccatgtcccatcggccatcgcttcctacaaatacgctcccctgtcgagaccctaaaccccacaaagcaagcatcgcatctctcttcttctccccccctcctcgccgcctctcccctctcgtcgatccgacgcgcttgggggagtcgacgctttctcttctcgcttgctaatcaaagctctcgcataattcccgtctctgtttcgttaatttccgcttgtttcatttaattacatagtcttcttagcgtgttgatttttctgtttgatcctgtgattgatctagtttacttctagtgatctttattgctgctggtattactgctgtttgtttccttgttatttgcgtgcttgtgctcttctgtttctgctaaccatggacgcaggctcccactcgatctcgtcggagaagagccacggactcgcgccgcggccgccgctccaggaggccggctcccgcccgtacatgccatcgctgagcactgcctcgcgcaacccgtcggccaagtgctacgtgagtccttggtttccccccgtccatgcgtgcgtatagactgttcgacgaaatgcctgaccgggtattgtgctgcgcgtgctctgcagggggataggttcataccggacaggtcggcgatggacatggacatggcgcactacctgctcacggagcccaagaaggacaaggagaacgcggcggcgtccccgtccaaggaggtgtaccggaggctgctcgccgagaagctgctcaacaaccggacacggatcctcgccttccggaacaagccaccggagcccgagaacgtctctgccgcggatactgcttctacccaccaggccaagccggccaagcagcggcgctacattccccaggtaacgcacgagctttgatgttccttcctttacattgatgcaacgatgtgggattgtgattactgatgcggctttgaaaccgatgtagtctgccgagaggactctggatgcaccggacctcgtcgacgattactatctcaacctgctggactggggaagcaagaacgtgctgtccattgcgctgggcgacacggtgtacctgtgggacgcctcgagcggatccacatctgagctcgtgaccgtggacgaggacagcggcccgatcaccagcgtcagctgggctcctgacggccagcatgtcgccgttggcctcaactcttccgacatccagctctgggacaccagctccaaccgactggttagtacattgttcggtatcctataatatttcgtgtcctaattcttgcttgatcagtacatgaatcagattgttctttctctgcagcttagaactctgagaggtgtgcacgaatcaagagtcggttcactcgcatggaacaacaacatcctgaccactggcggtatggacggcaacatcgtgaacaatgacgtaagaatcaggaaccatgtcgtgcagacataccaggggcacagccaggaggtgtgcgggctcaagtggtctggttcagggcagcagctggccagtggtggcaacgacaaccttcttcacatttgggatgtgtccatggcatcgtccgtcccatctgcaggccgcaaccagtggctgcacaggctcgaggatcacacggccgctgtgaaagcgcttgcatggtgcccattccagagcaacctgcttgcaactggaggtggtggtagcgaccggtgcatcaagttctggaacacacacaccggtgcatgcttgaactctgtcgataccggatcgcaggtgtgcgctcttctatggaacaaaaatgagagagagcttctgagttcacacggattcacgcagaaccagctgacattgtggaagtacccgtcgatggttaagatggctgaactcactggccatacttcccgtgtccttttcatggctcaggtgagtttcttcttgattagtagttttgcagtcactgcctataagttaatctgttatttgctgatcgtcttactgtgattgaactacagagtcctgatggttgcacagtagcatcggctgctgcagatgagaccctgcggttctggaatgtgtttggtagtcctgaagcccccaagcctgcagccaaggcttcccacactgggatgttcaacagcttcaaccatctcagataaggatgaaccaggtgaacaaattcgtctatttgatctggtcctttggacagcttaaaaatgatcgtgctggtatatttctagaactcgtatttattcctcgattgtttaaccatgttgagcctcaggctttggttattgatcttttgctcactgattttccttttgcaatgctcttgcagattgagatggccttggcacaataggctgtgcaagaagagcattgcagtgcttctcatgataatgatccaatcgtttcggttagtgtcattgctccctagttagcacttaacacaaatgcatagtacggtgtaaatgatctttgtttgtttcgtttgctagctttcaaacggaagatcgcaagtgagatttggcttcatcgatatcttcatctttgattggtagatactatcttcgacttcaagttcacaaagagcaccaaaaagaacctggaaatgtgcaaaaccttatcacttatcggggaatgaaatgctgagttggtgacttgagataggaatatatacttctggcaatttagttagttattctgtacattatctaaaaaaaagttagttcttctgtagagcatatgtaaagcacacacatagtatctaaaaaaattgatcttgttttaattgcgccaaaagatcaatttttgaagaatcttttggtggaaacatcaaatgatcggtttgatgtaacaaaacaagaggtgtagttcaaatatttatgtacgttcttcctccgtttcatatcatactattcaaaactagtcgtttgaccttttttagtcaaattttatctagtttgatcaatttttcaatacaaaacaaacatatttgtagtagtagtatttttgttagttcatccagagtacggacacatttgaccaaggttctaacttctcttaacagatagtagcacttgcattttttgttcatctgaagcagtagtagggctgaggtgccgtagtagggtataacaatattggaaatttgattgaaattggaacgatgtgatggaaaagttaaaagttttgatgtgtaagaaagtttttatgtgatgtaaaaattgaaagtttgaaaaaaaattaaaagtttaaagaaaaagttggtaactaaactagaccacagtagaagggaaccatgaggacaaacaaaggaacagtgattcccacccatgtggcccgcgaaatcggagcgggcaggattaggattcgaattccacccctcccttgtcgcgttatgcctctccctcacagcctcgctccggtctccgccttctccgccccgcgcgcggtgccaggctcgccggttcgccactaccgcacggcgcggcgcggcgtatggtggtaaaaaacaatacgatgacacagtagtggagagcacgagagattccgtgtgcccccgcggccgcgtgcaccagctcaccgtctgacttgctgcttcgccgccacccaacagccagacccgcccggccgggctaattctcggatccccttccgcgccaacgacacgcgcgcgcccggatgcatgtgaccaccgccatcaacgctccgccgcgcggacgcacgtacgttagctcatctgctcttgtggagtggggtttggctacgacgacgacgacggcctcctcggttaatctgctgtgatgctgctccatatgtacgtgtacgcttcacgatcctgtgttcgcttgcggtgatttggtttgaggctaattgccaacgaacgcaggctctggctaactactaacctaggaacatggaatgatgcttgctggactagagatagtactagcatatatatacaggtactggtggttgcggatgttgtctgttggcgtccacacagaacattacaagagatgagggtagtagcttagctaggtgtttgatgagacgatgatcagagctgtggcatctacagttagtaagtgctatttatgtgcacacaagtacactgttccggggagtatggagaaattgagccttcgataattggtgtcacaagctccgatcagaagtgataatttgttcgatggcatcagctccctcgctttaagcatacgattctatctccaaaactgaaacctaagtatgcgattctcttggatggggaagaagtttacttgcttaaaggggggataattaaagtgggaaccggaacaaagacaaacgaaacgtgggctcctcgaatctacatgcaaggaagagagaatcttatgctgaccaaagtaccaaaccatctctctctccctggctagctgtagtagagtagtaccgagtaccgtcacttgaaccacctaacacctaccgccgtttactgtcgcaggcatcggattccagcaggattactttggctatgcatacacaatttcatgtcttatcatcagctattcaccgtgggaattttattccaggttcccaattttggcttacacaccgatcgggccaaacgtgtgcactgatcctcacagcgatggactcgcaaattgcaaccgtgccgtcaccgtcgtcacagtttagacagcggctccatcgaccacaagataatccatccacttacgcaggcacctttctctgacgaccaacacaaattgcgtctcgtctgcatatctgtcgcggcagcgactgccatagtgccatcactcgcgggcgtcacgactccacactttacaaaaccagcacagttatcgcggttattacgtgcgataaacttctcagcttttaaaatcacgatatatctcatggtaaccgtgtagttacagtgatagttgttaaactgtgaggtggtggtaaccccaacccaaaacgatttagagaaaccgacgactcacgccgatgcatgccatgcctgcatgaacggcggcggcgatcgatcgggccggggaggaattgaaggctaagggagaaaaaaaaaaggagtattggaggggtggggcggcggtcacaaccaagttggcgcaaatattcctcccgggcgaggccaaggcaaagccacgcgacatctccccgcgtctctctcgccggccgccggccggccccaccgcatcgccccggctagctagcttagctatggctctcgatctcaccaccaccctttcgctctccgccccccggctgctacttgcctgccgccggaatattcttatattctcccccggcaaaacggaaggctaagtacaaccgcagctcgctgtcgaataaacgaccaaagagcgcatcgcgtattcgcgtgcgaattccatcggcacgaacgcgcgatacgcatggagagatggggttgatcaggccgctgttgctttcatcgatcgaggaaaaaagtaacgggattctctctcgtcctttgggttgagtttttttcacctggcaatgccacggcgcatatgcggttgaattgttcttggcatcatcgggtgtaaccgtgtaacaaccgatcgatggtcgtcgatagagcgcccggccggcgatgctgcggcatcgtgatcattgaccggtgaggtgacacctaatcaccggtagtagtactactattctttatgcaaaatctatacgtactcctcctagtaatgatcagagtatcagaccggacagaccagacagcttctctggccgacgaccgaaacgcagcggcacacatgaacacatggcaggggccgctcttgtcggggcgcgaggcgtccacgtggcgccccctcccacatgcccttcgttgtcctgttcccccccgctcgaaggacgctagtacgtgcacaccgctcgatccgacggcagcggcgccggcggcccgtccacgcggcgcgccgcggttgacccgcgttgcctctcggcacaaggctcccctgagattccggccgcgcgcgcgggcgcgcacacatgagctcatgatgtgaacgtgatgatggtgcgcggtgcggcgcgacacgcgacgcgatatgctttctctctcctcctcttcttttggctccgcctcgcgcgccactctcccgcccaggcgcctctctctctctctctagtttctcgcaccacctgcctacatatcgccacagccgctgtcgtcgtctcgtctctgtgtgtgtgtctccatcagacgccggccatatagctagcgagaccggcacattcccatcgggaatccgcctcgggcttcgccgcaatcccacgctaactcacgccgcaccagattcacgctcccagctacaaactcccagccgcgcgccggccgcacgcgcgtgcgcacagctagcgatcgatcgtgatcgtgaccgcggccgggttgactgccgctcgacgagcgcacacatcgatcagccggccggacgaggagattgtcagatcgtctcggctcgtcgacggattggccatcatgttcgaggggatggagagggcgggctacggcgtcggcgtcggcggcgcgggggcggtgggagccggggtggtgctgtcgcgggaccccaagccgcggctgcggtggacgcccgacctgcacgagcgcttcgtcgaggccgtcaccaagctcggcgggcctgacagtaagtaccaactccatgactccatctccgaacaccttgcaccatgtcagtatatgtcaccatgcccatgcttcgatctttctctgtgctacatgcgtccaaactccaaacacaatcgagctgctggagctgtaggccagcagaatttattagctgtgatgaatggaacagtgaaggaaattaaatcctgttcttgtttgcttgcttgtttaattggagcctttaattgtctaacagcgaaaaagaagcatgtccatgaaccatcatgagagatgccacagtgatccgtatatatgatcatgctgatcatcactcatcatcctcatctcataccattttggggccatgcatagttacatctgcatagtcctgtactgctttgtgacagcaactttatgctttggggttataatttcgttttccatttgactgtgtttggacagaggcaacccccaagtcggtgttgagactgatgggcatgaaaggtctcaccttgtaccacctcaagagccatcttcaggtctgatcatcttttttttactggtttttcttttgctttatttgcttcttttgatctaccacctacgatgctaatatgtgcttcttggcgacatctttttattgatccacagaaatataggcttggaaagcagaacaagaaagatacaggcctagaagccagcagaggaggtacatgcttttgtaaatactaaatacttctcactaagtactagtaacaaagatgtttttaaaaatgataaacccatcacgcatgattcatttctgtttcttctaaaccttacatttttcatgctctttgacagcatttgctgcacatggcatcagttttgcctctgctgcacctcctaccatcccatcggctgaaaataacaatgcagggtaagttagcagtcatcaccatgcttaattccagcttatgccaagttgattgcagtaagggcaatctaattttgactctgtcgcgtcgaaagcaacgccttcaagatcatgaagaggtgtatccgtgcaggactaacagcatctttttagttggcagggggggtacgagataggctttgtatatagagcgattggtcgtactatttgcgatttgtaaatacggtacaagtcatctactcttacagaagtaaatgcggtgcttaatttatagaggaaaacggtataggctgctaatgatttggaagattaggttgtgtgaaagggacactgtgtgctaaccgtctgcagatcaggtcaggtgttaactggtctgttgcgaaaatggaattttgtagtcatgttacatggtactagttccacaaaataacataaaaaaacagctaataagcagcacaaattgagtattcaggaatcggtctgtctctatactctgtcgaagcattattatacagtatactataaaaaatttgccgacagaattgcattaattcacttgaaacaaaaagaaaacaattgatcgcaatcttgcatctaatgcaatcactttctgaagtactaatccattttagaaaaaacaataagtattgtttgttttatgctttggatgagacgagcaattattcagtttggttttcaatgtcgcattcggattggcttataatttcttgaacaattttgtcatgattcagagaaacgccactggccgatgcgctgcggtatcaaattgaagtccaacggaaactgcacgaacagcttgaggttagattgccaatgcatcacccattagcttccctgcttgaatcgtagtgtagctcagaacacaaaaactaacaggtcaatgtgttgctccacgtacaggttcagaagaagcttcaaatgcgaattgaggcccaagggaaatacctgcagacgatactggagaaagcccagaacaacctctcctatgatgcaactggaactgcaaacctcgaagcaaccagaacgcagcttacagatttcaacctggctctttcaggattcatgaacaatgtttcacaagtgtgtgaacagaacaatggagagctagcgaaagcgatatctgaagacaatctcagaactaccaatctaggctttcagctctaccatggaattcaggattccgacgatgtcaagtgttctcaagatgagggcttactgctgctagatttgaatatcaaaggaggaggatatgaccatctgtcctccaatgccatgcgaggcggcgaatccggtctgaagattagtcagcacaggaggtaaagattcagtagaatggcgaccatctgtagtttaaattaagagttacctttgtcctatgagaaattcttttgtggcgatattgagggtgcttaagtacagtgttggtccagagtgtactaatgtaaaatttgtggggtaaaggctctgaataatcgtagctaatcaatcatgtctagatctgaatatcagaatatatacactgtatgagtattcgtacctgcactctaaacgactaaagcaaaagcattatcaagtcttgcaacagtccaaccacgttgaacttctggtcattttgtagtagaaaagaatccttcgtggtatcattttggagtaagcacaccacatcagatgatcagagcaatcaacggcaagcattttgccattttactacaggggaaggtctgactgaacattggtgtagtgcagctacaaccaagatgtgcagcagaaaactacatctgaaactgaaaggatggaactggagcttctgaattctgaaacagagctccagcattactgaggtaatttatatcatttgggtgctaaaaccagcagttagtgcagggttcaaatggatagtagcacatgtgaaattgaccaaacagataacaggacgcaaaatgattggtttccaactttccagcgaacagaacaaaatgcaccaagaatgatgcagtctacgctaaactgaataatcaatgtattaacccacaaacagtggctatcttatggtagggagttcaatagcataattccatgcacacatgaatccggatcacgagaaatcatgtcaactcgtgaacataagaacattgttatttgatactatttctcatgtatgttcctaacttcctatctactactgcggtagcacagatcaacagcaactcgtgtttcttggtaacaactgcagagctgagcaggacacaagccgccgtaagatttcttcagtgataatcgagcggggcagggatatccttgagatccatcccctgaaaatgaacatcctgcatgcacatcacaagcaaaagaacaatccagtcatcacaagccgtacacaaagcccacagcaaacttaggaattcacacgcacgtaccgacgcgaagtggttgacgtcgcggtggtgtgcctcgtcggcgcggacgacgacgacgacgtccttgagcgtggcgccggcggggaggcgccagtagtcgatggcgatcggcggcgcggggacgttctcgatcttgccggcctcgatgtccttgaggtactcggtgtaggagtggatggcctcctcctcgaggtagccgacgacgcggtgcgcgagcttgggggacaggaggtagccgaggaagtaggcgttgaagaagacgccctggacggcgagcacgagcgcgcgctcgtaccacctcggcttggccacctccatgaaggtcatgaggtgcatccgctcgttctcggcctcctccagcagcgcgcggatccagccgccgctgtgctcgaagcggcggagcgaccggaggtgcagcagcatgccgcccaccatccccggcaccgccgccaccgtctccagcatcatcgcgcggcacccgtacctcctctgcaaaatcgttccattgattcccatccatttcgatcagcaaaatagattggcatgatctttgatggaaaattagttgtggttggttacctggaagaagatgtcagtgggcacgcgcagcgccttgacggtccagtaggcgaccttgtcgagcagcaccttcggctcgtggtgcttcttcaggtcgatcgtcgtgtccggcgagtacgtctcccatggctgcaaattagcaaacacattaattcatcgacgcagttacacaaattgaattcagattagttaaattaacagcaaaaaagagaggaagcgatctttaagcaggatcatggataaatcgattcttactctgaagcaagaccacttccactcgacgccgtccttgctcgcgagcttcgacgcctcgatgccccagtagctgctcgccacgggactcgcagtcgcactggccggcccttccttggcggccttcgtcgcctccgccttcgcggcggcggtgctcccggtgttctccttggacgcggccgtctcctccttcgccgcggcggcggaggtggacagaagtcgcgcccacaaggccacgccccctccgccggcgccggctaacggaggccgctgcgcatgcgcatgcgcagccgcagaggtcgagctggagactcgggggcagaggtggcggaggaggactgatccagcagcgcgggagcccatcgccggagatcgtggagacgctgctctgctcttcgctgaggtgtgcgtgttgatgctctgttcgtggctgcagacgtgccggtttctggagggggctagcttcagcgtgcagatccacgtgtcggcgatttcgttcgttgctgcttcttcggatatacgaggctgttcattttttaaaaaatatatttaaccgtttattttattaaaaaaatttaagtaattattattcttttccaatcagttgattcattattaaatatacttttatttatatttttatttatatatatagttttacatatagttttatatattttgtaaaagtttttaaataaaacggacggttaaatatatttaaaaaaaatcaacgacatcaaatattatttgggcacgaagagagtattatactgggaaaaggagttcatggtggctgctaagcggcaagctgatagcatcatagcagtggactggtctttcgtccacttctttcttcgtattttctgtggactatatagttgctttctgtgtagaaataaaaaacgtgtggctgcgcacaatgatcaggtgacatcgatcagttatgtacgcggagatgattaaagcgtataacatgcgacatctaggagtagctacgaaaatattagaaaaaaaatatggggactaagttttttttcttttggcataaggttcaattctttctcattttttagcaaaatggcatcctaattacatatataaagcatatccactaatcagtctatttttttaagaaatccaataaaattctaacaaccacggtaaccttttgacatccacaatataccataagaatgagtcataagatattatgactagtcatatacattatgggcactagccataagacattaaatgttaaaactagccataagcttacggctcaaccttaagaaataaaataataagataaaatacactaaagagtatgaaaatagattatggtatggtaggacctaccttaaaatataatttgtttacatagatgtgagacacatcttaacatctattcttgtcttcaatattatagtcatggatatatggtatgatgggacctaaattattttcaccaagaccttaagcattgctgttgcccttaatatgggaggagatatcctgttttttcatattaaataattatagaaaaaaatagtttaacatgtaacatattacaacacaagcacataaattaaaatacgatatgcaacaaaatgaacaaattaaactacaattagttaacatatattcataattattttttaatttatataagttaaatttaactttacatgtttatcaagtgatccagcacaaataatatatatttttaatttttcataactatttggataacatataaacaatgagggaaatagttttgtttccaattgaatattaatattagtgcaccacctttttaaatcctaaatgaaaaaggtaaaaaaaacacaaattgaaagtttacaacacatgtaactaaggtgccatgattcctgtaaaaaaaatgccttaatgcaatacatgacaagcacgggattgcatgagcagcaataagatgtgaagacgaggtttgaactcacagtcttcattcaaaacaaagaaagagctttgaactcatggaaaaatttctccaaaattccaacagaatagtgcttccgttgattttcagtggatttcgttggattaaattctttttgttgcaacgtatacatgattctgcaggacttcttttttctccctatagttggactgcaatccaaattgtccattttccagttccagggcctaactgatttctgggcgtcctacggaaccaacggctcgtccggcgcggcgggcgggcgaatcacgccgatctccgggagatccgggttaacggagaacctcagccaccgcttcttctccacgaacctcagcgccggctgcagcacgagccccatggccaccgcgccgaggctcaccaccgccaccttcagcgtggacagcgcgagcaccacggcgatcagcgccgtcggcggcaccagcatcgccacgcacccggctgtgcccagcggcaccctgtatgggcgcgccgcgtcggggcgcctcacccggtgcaggatgaaggcgacgaactcgaggagcatgccgaagcagtagaggaagttctcggccgccacgatctcctggaagctcatcatcgagagcagcagcacgccggaggccgagaagaggatgcccgccagcggcgtgccgtaccgcgaccgcgccgcgaagaaggacgggagcatgccccgctccgccatgcccagcagctggtacgagtcgctgctcatctccgccacgaacatgcccatgttcgacagcgccgccgccgactgcacccaccacatcagccacgcgccgccgagcagcttcgcgatgtccgcgaagtagccgtctgtccactgccccctgtccagcggcacggctcccgtcccggcgaggagagggtacaggtaggcgaccaccacgaagatgaccgcgtagaacagcgccttgggcagcgtcttgccgggattcttcacctcgccggccaacgtgctgatcgaatcccagtagttgaggttccagaacagagtgttcaggtacagattccaatcgacgttgtggaggtcgatcacgagccacctcgccggccggagcttggggagcgcgatgagccccatgacgaaaaaagggaggagggagaagacgccaaggcagatcgccacccatccgacgacggtgagcccccggtaattcagcaatgtcagcacggccgtcaggccgacgacggcgaacgccctcggcgcgcctccgccgagcgccgggacgccggacttgaggtagtccaagaagaggacggggtagagcgcgttgtcgatgacgccgctcaaccacttcatccacccttgctggaacccccagtacgggccgagcgccgacgccacccacacgacgtacccgccgttctccgggaacatggcgcccagctccgccgtgatcagcgcctccgggatgctccagatgacggggaggaccaagaagccgatgatggcgagcagcggcccggccgcgcccacgctgtcctcgatcccgaacggcccgccggacacctcgtagaagatgaggaagatgagcgggatcatcgaaaccgtgcgtgccgacgacggcattggcccgccggcgtcgccgtcggggaggcccctgtactccgtgccgcactcgcccatcggagcggcaccgttcgccggttgggcgctctcgacggtgggcttctgcatgtcggagaagagaagaataattggttatctatacgaaagcattagcagaagagatgtattgttgagttgtagtaggcaactactcgagttcaacaaggagacccgcctgcaaaaaacacaagaaaaacacaatgacaagaacaaaccatgtgcatgtagccacatagtatgtttagacaaaaattcttgacgaaaccaggcgttttgtcagtacgaacgaagatgtaataccgaatcaaacaccaaccattggcccaccgtgtaatcttgattgtgaagaagggcaagaactcaccaccagaagaagctgcttaatccttcaatattctaatttggtagtctcaccggagggttcccatctcaagatcgtgatggacccgaaagaacagctagaacctgaagagggattggctcctttgctccgctctctttagcatctttcagaaataaggtacttgctgcatcttcgacgaagacatcctgcattcctactacgtatcatcaagctatcaaccaagcccgcaagtggatttgtttggtgaagcagcggcggctcacagagagctgagagaggtggtgccatgcggcgttcggccggtgacacctgttgcggcagagacggccacgcagtccgctccggctacacttgtaaactgcagggctaggtggctgcttctctcccgcctctccgctgcttcacggcccaaaagccttctagcacaaacttacaattgggccatagatgttagctaaggcccacgtctagcaaattgggccgaatcggcgaatctcgtcagccctgacagaccaagacatcgatgcttcagttccttcctggtccatggctgcaccgtacaggttaaaaagtcgtacgagatgggccgaatcaatgcggaaaacttaaaagatcttatcccaaacaggggtcagattgggattggtagcgatgcgacgagagaggggaaccgattagccgacgaagcgatcccggtgcacggctggctggcgaacatggccgcggctctcactcgcacacaagtagacgtaggagtatacacgagcagctaccggcggcaaaaccacgagaaataggattgagatggagacggggatcgagcgagctctcacctcttgcccggtgtcagcgtggccgagatccgccgccgccgctgccgtcgtagaagctgccgggtggcccggcgaccggaccgtggccagcgacacctccggccgtccgccggtgtccgccatggatcccccgatccctccttcctcctccccgtgccccggatgctggagctcaacctgattattattacgcctccggccgtgcggagtggaagcgcgcatccagcataaatagtggcagtacgtcgctttccagtttacaaattatcaccagcgtgagcataaagcgcgcagcacatttggactgaagttgaaccaaacgaatagaaaaacacacacgcggggaaaaaaaagaaaaaaaatcctcacaaagcgattgcctttctcgagagcaaatcttgcactgtagcgtgtgcacatggccagtgcccatctctaccgtttttgctcctacacgagacgagaatgtcagagtacgcggcatatgccaagcaaggccgtgcgggaacacttggctttaggttgagttcgagtttcccaactcactcccttcatttttcgtgtgcacgttttttaaactgctaaataatatattttcagaaaagtttatataaaggcgctttaaaaaatcatattaatctgttcttaaaaaatagataatacttaattgattatgtgctaatggccatttcgttttccgtgggagagtagccgtgcattgaataaaaattggtctcgagcagggggcgccgctaatgctagccccgtggtagtacaatactacaacgcagcagggcgattcaacccggaaacgatggaaaatcaggcatcttcccatgtgcacatggcaaagcaaggggcctctcgttctcatctgctgttatgactatctgtgcgagccgttccggcggctgtgataaccagatctagcacgtgatcaagcagtgcgatttatggacggatccccgcgacggtcgctgcgacgctgcctcttgacgggtcagaagttaatcagcaatcaggagtattcagctgagaaaaaagttcctaattgactgtcaacaaagtgacaagacttcagtcgactggctgagttagttcggcagggttagaacaactgtcaccagaattagaaaggagagaatataagttgaaaaagtgttaaaatgagcatatccgaataattgcacattgagcggtatgcctagaaagtaaagtccaatgcaactagaactggtttatctttggatctgattctgacggattactacaacaatagtatcgtttctttttacagcgaatcctgcctactcttgtagtcttgtgatgatcagcatcaacggacataaaaaaaatgacagggttacagcgaccaacattatctgaaaaaagaaatactgacagggaatgccgcttgcagtttcactgcgtggagtatattcccaaacgttggattcaacagaaaacaggtagtaaatcatattaccatctcaccaattccgccaccctaataatcgaagatatcatggtccatacctgttcccgaaaaaatacaaatccaaacggaagcaacccggcccaaaatcccaatcatagaacaaaccacacacatttgttggcatcctgaaattcataagcaggtcggcttctctctctcaaaaaaaaatagcaggtcggtttgtccgtcagagcttaaagatcacatcaagctgacagggcgaccagccaccaaccggggagagggagagcgagaaagaatggacaggcccgctgcctgcgcgcaccaccacctgctgctctctctctctcgcgtcgggggccagccaatacacttctccgctccgcatcaccgtcgccggtggggaccgcggcgaggcgatgctgtcgatggcaaggaatgtagagaacatcggccccgtggctcgtgaatgggaggggagatcatcttcgtgctttggcaggtctaacctaacggctggcaggttgcgcccccactgcatttgccctttttcttgttagcgaaatcactgcacttgatgtggtaaccccccatcatcagtaggagtaataattatcacgatccaacaacaccatcgcacaaaaaaagtccgcccgatttaaaacgagcttttgccgtatcggctcgcctgaaagcgtgtcattagcatgagccaaaggaaggagagggggtgaaaaaaaagggggcagaaaggaatactttcccttccgttggagcaaagcgggttaaaaaagggttgggaggcagataagaggggagagtcccggacggagcgcgatgccggagacgggacgggtttgaggttggggagtatggttataaaaagtaacggggcgcgacgcgggtagaaaccgtggtggaggcaaaggcgccgcgggcttggcttggctggcaccctctccttctcgtcttcggcttcgtcttcccccgtcaaacccacccacgccggccgccgacgccgccgccgttgcggcgggtgcttcccccgctcgcgtcggtgccggggggctgaggggaagagggggagggggagggaaggcacgcggctgacctcgtgggggaggggagggggggaacggggcgacaccacccacccaccgccaccatgtgctcgttgcccgcctggtaaggtatggtatctgtttcattccattgccccccatctttctcgtgcttgcgcccctgcccccgccgctgtactttcgcgtgccctggattagctggttggttcatctgcttgttgcggcgcgcggcggatctgtgcctccagccgccggatctgggtggttcgcgggcgttcggtgcaatgcgagtctgcgcgtaagtttttttttgtgtgttgtggtgaacagtggtgataattattgcagggtttttttttttatcttgtgggggtcgtgtccctgttgggacctcggatctgttcttgtttcgtggctaatttggattttatggcagaaggaagacgttttgtcacaatagattgagaacgctctctttttccttcccatggatggtcataatctgtgccttttggtgcttagcgttgtaatttgtgattagggtagcaatgcagattgtttcacatcatgttccaacccaaggcaatgcttctgagttacgaaatgtttgtaatatttatgaccttgctgtcttgccatgcttgatcgatcattgttgttaaattggatacccgcattacttccaattttttgcacttcttaggtagttaggggtataggatgatcattccatgtcgacgccttattgcaactgattgaatagtagcatcggtgtcaatattttgtcaatgcagcagcaacactctaccttatcaggcaatgttacctatagtgcatttttttttattctaggaggaagtgtatttgattgctgccaagaaggcagtgcttcattttgcacacatcagttttggtacttgcatcatgtggcctgtacatcattgtttgcaaagaagagaaagctgaagcgctataaatccttcaagcagttttttcggtctaaacccagccatatctgagtatgttagaatgattattatgtgcaaggtttctgtcggttttgattgtgatcctcagacataccttgtgacgcagatattcatgctgagttgattccttctagtcactttgcatgtacctatagtttgaacatgtgcacggaagtaatgatctttgactgtgttatatgtttctgacttaaatctgttatattagattggaccagctgtgatttggggagcttaaagttttgatcagagacatggaaaaagtgatcttctgggcacatctccttaaatgcaagctttttctttcaaaagaaactcttgattggtgtgttttagctcgtgggaacacccaccacttctctctggtgaactacacatagtggttttatgctcctttatgctcaagaacatttggctgattcaatctttttcctgaagccatatttcaagtctgccaaacatctacatgtaatgcacctacttcatagcttgttcttccttcattttgtgtcatatggactaatttagctaaccaccatctttttattctactagcacgtcatctctaaagaagcttcctttaagttgtagatgctgatcatataagctgggtatgcctctttttactgttcattgatgcatttattggcatttagagaaataaattcttgcaacttgaaatattctaaacaacttactccttcccttattttgtagggttaatacctttgctcatttgtttgtcatctgttgctccctagttaattaccactagtgttgcattgaggtcagggttcatccttgctatagtatgcaactatatactatggttgctgcttgatcttctgagtgaaccaagatccaagaaaacataaggtgctggggctactgttcaattgactggttgcatatatttgttcgtgctaatcgatagactagtcaattggaagtggtggcaaacacctgtctttgtgacttggctgtccaacaggaaaaggctagcacaaggctgacattgaccggcataatggacaggtaactttcatattgacttactatttttaggtcacctttttcttatcaagtatgttgtctttgcagattcaaaatgattaaggaagttggtgacgggactttcgggagtgtatggcgtgctataaataaacaaaatggtgaagttgtatgtatctgaagataaatccataggaggaaatatgcatttcatacttttgcaaaatattcccagtgaaataaataactgattgtaagcaaaatgtgcactgatctataggtggcagttaagaaaatgaagaggaaatattattcttttgaggaatgcatgagtctacgtgaagtaaaggtattttaactgaaagatgtaccctctttcctgctatgaaccttcaactgatatttctcctatattgaagtctttgcggcgcatgaatcaccctaacatcgtgaagctcaaggaggttataagggaaaatgacatattatacttcataatggaatacatggtacttaaggatgtcatataccgcaaaagtttaattagctctgtatcgcttttgttaagtctcccatgttcttccaggagtgcaatctctaccaacttatgaaggatagagtcaagcctttctcagaggcagaagtccggaattggtgctttcagatttttcaggctcttgcatacatgcaccagaggggttactttcatcgtgacctgaaacctggtaggttctcttgtttagtcaacatcttcacctatatttctgtggcaatcaaattatgaaactacggatgagtatcagatgtaggtatgcagaatcagggtattattgtattgagaatatgagacatttagcctttatttttaccacatctactttgcaaactgaccgagatatactttctaataaatatatactttcatgtgggattgtattgtgcttatagctatggcactaatcactgtactaatgcagagaatctgttggttagcaaagatgtcataaagctggcggactttggtcttgcaagggaagttacatccgtgccaccatacacagaatatgtgtcaactcgctggttagtagcactctactcgcacacgtggacacaaatcccttttctttgttaatgttgatccacatgtgtttgaacatctcaggtaccgagcacctgaagtattgctccagtcatctatctatgattctgcagttggtaaagtttctactatctactttgtattttggcacatatagtacatactaagtcatgattggatgatcccctttttgccaacttgcagatatgtgggctatgggtgccataatggccgagctgttgacacttcatcctctttttcctggcacaaggtataatatgcatatatcatatgtatatgcattgttgttatgatttgtagtcacgtatctctctgtgtttgccatgtattttgggcatctgttattctgtctctcttattatatttcttctttgtggtggtcatatttgctcattgctgttctctttatccaactgtttagtgaggctgatgagattctgaagatttgcaatgttatcggtagcccagatgaacaatcatggccacaaggattgtctcttgcagagaccatgaagtttcagttccctcaggtcagtattcatcttccccttttccctttgcctatatatgttttcttttgggggtaagctctttgttgtgattatacttgtttctgaatgtgtcatgaatctttgatatgtgttgagcccattctgcaactgtttattttaatcccttggtcattctctgatgaattttgtccttgtgcctccctatctctctagacaatggtggaattatatcacttcgcatgccttacaatctttcatctccattagtccattgcctccttttcctcgcatattatcataggtttaaaagcgtagtgtcttgttctaacttgattcatgagtttgacatagattgtccataaatagtggcttaacacttaactaatctcatgtggatcttatcaatgcaggtcagtggcaatcaactggcagaggtaatgacatcagtcagtagtgaggcagtcgacctgatttcagtaagttctacaattctgttgccccagatggcgtacttaaaatctttagattattttattatatttgtttctttctacatctgcagtcactgtgctcatgggacccttgcaagagaccaaaggctgcagaagttctccagcatactttctttcaggtaaaattactattcgaactccgttgctgttgtctgtacctctgttgcagaagataaatcaaatttatttttgccatccactagggctgtacatttgttccacctactgtccggtcaaaagctggagtgctccctaaaacgcctccatgtggttagtttccacactgttttgcctcacaaccttggtgttcctggtactcttgttatatctatgatctatttgtttcagttggagtaaaaggagtttcggagcacggcatgcctcgaagatactctacaggaactctatcaacaaccaaacctcatagtaatgcatctctgaaatcaagtggcttatctaagaccggtaatatgtttaatcttttttctcaattgcttgttagcttgcattgtaggctatatttttatttctctttccaccttccaggtgtacaaagaaaacttcaaatggatcgtcaggcgccacagaagattaaaaaacctactgagagtaataataaactaaccactaatcgagtacctgcaaggaatagcccaggcaagtttccatagttgctttatttgaattctacatcaatttgtggttgactttgaagatttacattccctttgtggcaattataggtcaccctgtattaaggcattcacgcagtttacctgaaactggccgggcaacaatgcacaaggtttcaacccttaccgagagattaactcatatgtctgttacctctcgaacgcgtactactcccaagcctgctgccccgttactgaaggctgggctcggcaagtctgacttactgggaaaaacagacgaaatacctcctgcaaagaggttgacaagaaaattagtaagctaacgtagcagcatccatacagtggaagctggttagctggtgcagagaggtgttataagctacagagcaaaatcccggtctgctgaaaatgatggcactgccggagtgtttgccaaatttgctgcatccaagtgccatagtagaataagtcgagcctgccgatccacgtggatctgcttttgccccaagtttgttccatgtttgaatagaacatgagtgtgctatatcgatttgaattgttgtcgaccagtgttcactcgcatatgcggtctgacaaatgatagacccgcgagcaggaggatgtttggcttttgcttgtacagtttatgagcttttgggtggcggtcaagtctttgtcgggtccttggcaaatgatacaatgcatagtctggttttgacttcgtctgtggctctattcaggtctttgtttgaagatgatgtctcatttctcatgaaccttcgaatgttggaaatgacctgattgtatcactatcgtctgctctactttggacgaacctgctagttgtgcatgaccggtgcacttaacaagcaatatatacaccattctaccgtcgaggatcacatgaaaccatgctaaaacaaacgaattaaacgaacaccctgtccataaaggttacaaacggaagaccaaagtggtcagttaacaagagtagcagcttgactgagcctgctgcttctcagaccacagcatccttccccctcatcctatattcaccctgtaaaaaaaacctagtagcactaaccgtagcagcggcaaagtagtagtatcatcacactcttaactattcttcccggcgacgcgttagcttctgtcacagtatcacttcactctcatcaacgatgggtctcgcgttagctcacagatactgcgcgtgtatccggtcccggttctgctcccaccacaccttggcccgctcctcgccaaatctctcgcggctgcaacgttgcgcacagagagaagtgttaaaaattccacgcgaacacgaggaaaatccagcgtgatctgccggtattggtgacgtgttagcgttttcgggatgtgtgtgtggactgtggagtggcttgcctgaaccggacgcggcggagctcgcgggtgccgtcgccgaactcgcggatggtgatggacaccccaggctcgtcctgctccacccactccgtggcctccaggtcgctcgcgttgctgatggacacggacgcctcgtcccgggacgacgtcgtgccgcgcgacgggtcgtacggcgccgctggtccggcggccgcggagttgaggaggttgaagtggtgcgcccacacgtggtcggacgggtccggcacggccgtggacgggtagaacggcggccgagccgccgccaccgacgacgacgacgacagctgcgccttgctcgacgctgtccggctgatcgggtgctccctgccagcacccgacgacggcagcggcggcggcggcggcatcatcatcgccgggctctccctcgtcgagccgacgcgggagtagaacgaatctctctgcaaacatcaaccatcatcagcaacggaatgtgcagagcttttgctaaccagtgatggaacggaagtgacctgcatggcttcgtcgacggaggacgtcggcgtcgagaagccctgctgccggctgaacgtctgcacgttgtagagctccaccacgcggtcgtagttctccccccaccaccgctgcgcctcccacttgttaaacatctcccggctgcatatgcatcgccacaatccgttagctcatgctcatcactcgagcaccacgtgctcgacgaaatgtcatgtcgcttgattggcacgaacctgaaacggatgcgcttcagatcgttgccggcgccgccggggatggagacgaaggtgatctgcacgccgggctccacctgcgccgtccactcccgcggcacgcggtcctcctccaggaggactgtctcctcgtcatcgtcgtcgtcgtcgtcgtcgtagtcttcctccccgatgctcggtaccccgctcgcgctcgggctcctgatcacgcgcggctggaagctgcggtggttcaccttgggcggcaagtcccacgtcgacggcgcggcccgggcgccggcgctcgccgtcgtcgtcctcatgtaagtataggcctcgccggccccgtccgacgtgaagcccgactcgtcgatgatgcccgggtacgcggcgaggcggctggagcggtggaagcggctggtcctcaacgacgggctcccgccggacttgtattggtgcctgccgctgccggagaacttgagcaccatgtccttcaactgaaaccacattaaatttgtgcagattaattaattatcctcctgaataagggatcaattgattttccattgtaaaaatatttattaaatatccattagtcaagttaacatcatccttttttttttttgaacgaatgccaagttgacatcatcatacaacagatgatattatatatctgaggtaacatttttgccttgcatattcagtaaatataatttcttgcaattggcaacagagtggctgcatataacttttaacatgccattgcctttccagtatataaaactgcgggagtttcgttcggggcatcaacattcaccactaacgcacacgcctcagcaatcaaatcctacgcgacagctcggtctctcaagtaaagcgccaatcatatccacagcagggttaatgatcaccgatcgattccatctccatcccgatgattagggctaacaaaagcaggacagggcgcacttccgacccccagattagtcgcgtagacgcctagcagaagggctcacacatcaccgaaaagcaccaacaaaaccatcacaatgtcctaaaacccaggacatcttttgcctgaactctcaagcaaggaacaaagcaaagacaaagcacacccacaccacaccactcaagtttctcaaagcaacatcgtggacagcgccccccccccccccccccccccggatcataataacaccagagagggaagggaatcgatccggtccatccacacacacacacacacatagccacacaggtgcatgtcatgtggtgcgtgcttatgctccaaatatgtgtagtactagtactgctactttaaaagacggcaaaggcgaaagcgtgcaggaagcaaaggacgagagtactcgagtcccagtgacgaggcgtgtcatcatggagtagttcagagatgggtcgcagcgagagcccatcttaagaaacaaaccagcccatcgcaaggaccacaagtgtgtgtttctgtgcatggcctacgggctggctacggcccagctttattcttctctgagtgtccaggaccgtcttgggggggggggggggggggtccctcttaagaaaagaaaagggaaaggaacatcttggactgaagagagtagctgcttgtttgataactcgaaggggattgggagtttacacgagggagttgatgatgagattaagatgggaatttgatttttaatcccaatatcttatttggtagaggtgatagaaattgatagggaatttagttggagattaggtcattaataaaaacggatggctgagatttggttaaacaaagtaaaggatgaattccctcctaattacctgcccctacccagttattgaaaaggagtgagttccttcctcaattccccatcctcatcccaccaaaattcccatgtctcccaaccaaacaaaaattttaatagcttcatccctctaaattcccaatccctactaaaaactccctccaaccaaacgggccgtaggagtaagacccaggggttaagatcaatcaaccagatagtgtctttccaggagggaaagatcacattagcagctactaggataggacagtcttttgttgggagcaagcaaagtgaatggatggatggatggatggagcaagtgaaaagggcaggggaatggtagtatgggggaacagaagtgaccatatcaaatcagtccaaaacccaaagcttgaggggatccatgcaagaaaaaagcaagagccttctctcccccaccaaactctagtcatattcccctgggccttgagtccttgaccaactttatcaaggaatgttttaaaatgtagttagagcactgtcattcaccttgtacttgtgattccatgcaggatattgccctgattagacacccggtgaggaagggaaaagaaaagagaaacggtgtatatcaccacaagtgtactagtattggttgtcctcctgtacgtagtggtactctgttccctttcaaaggccaagaacaaggtgacgacaagcaggctaggacaaaagaacaactacagtgtaatactttctcctccgtcccaaatgtaagcatttttgaggctgacacgggtattaagaaagtatatgagaatgattgaaaaatatgtgtgattggttgaaaagagaaaataggtgaaaaagaatggttgtgattggttgagaggaaaagataggtagaaaaatagcttcattttaaaataaagtactgtgctagaaatagctatattttggaacggatgtagtactagaagtactagcaccccactgctaaggagcagcagagggcattcaattgactggttaatgcaacagaagaaaatgtggcatcaggtctccgcccatgcgctagtgcacaacatgtgcgagtactacggatttttacttgtgtacggagtactggagtagtataagaatgcacatcagcacatgtacctgtgaagtcagagacttgccggagttgggcgtggcggtggcggaccggtgcccgccctccccgccgtccttggtcgaacacgcgatgcacgcaagcatttcctagcctctcgagtagtccagaaccgcgcaaatcctccttccctgctcagtcacaaacaaagtccatcgaagagccaagggaggagattgtcactcgttttccgcgcttttcaaactactaaacggtgcgttttttgtaaaaaaattttctatagaaaagttgctttaaaaaatcatattaatccatttttaaagtttaaaatagttaatatttaattaatcatgaactaatgactcacctcgttttgtgtatcttcccaatcttcccaatcctctctctctcaaacacaccctaagataagaatctggtcctggtgtatcaaaagaggaactgagccgtcacgcactcacacggctaaaatccaacatgtactagcaacgtagcagtgccattgatccagtgtgtgcaaggagtaaatacacggaacatttctagtagcagcaggtacatcagattacactgcagccactgccatggctgcagtgccagccggccggccggccggcatcaactccgagctgagtagccatagccagtgagtaaacgccgctctagctaatgcatgccatgccatggcctgcgccgcaggcttttgccttccttaaaatcgatacaccgacagcaacccctcgccagccgagtacgctgccaccatggggcgcacacgcccgcgcgtgtgtatatccatgcccttgggccttggcgcggccggcctgggcccgaacgcatgtttgcacgcgccggctcactgcagaccactgccatgtttgagctctggcttagctaggggtaggcgaggcatcgagcaagaaacggagtcaatgccccccaagctttggctgctttatggagtagtacgtagtatgagaggtacagggaggtagctgcggcaaagtatagcccgggtggtggattgattgattgatgcatgcacggattgatattactgcttaatgctgctgcaccggtgggctcagtgtgcaggcgtgcagctagtacgtcgtcgtaggtagagcattcattcactcaacaagcataggcttaattatgcttgctactgcagcaacaggcaacaggcaaccaaggcatgcatgccgataatacacgagggagcagagaaggttctgagaaaaactgtactagcaggagctcttttatctactcctacgtgaggacactgccactccgaatccaagtgcatcgtccagttccaagcgaaaggttggaagcttggagagcggccgatcgagctgagcaggaggcagatagatagacggatgatgcacatattgcacatttgcatggatagagagaagcccttttaggaccagggccctcatggaaattttatcagtggttgggagtggattggaggacccactgaaggaaatggaaaggcaaacagaagccttcttgcagtgtaacatcccaactaaaaaacagtcctacttgcacctacaaaattcgcgtgtattgtactattgtaatactaccgtttttagtttaagcttgttatactacaaagggtactaggagtaattaccaatggataagattgattatatagttaagtgtggatgacgacaagtgagaatactgcttaccagttagcaagccaccatcaggctattgctcatccaaagcaactcccgccaatcacagtctcgcagcaatgcttgtgaccacgcggacagtggtatctcgtcactgctccttctgacgcaaagatgatctgaacaacagcgacagggaagagaaggtgataaagattacgcaatgtacatgtggccgactagaaaagcataatgctcacttttatctgcaaaaatactgctaggacagatatttagccgattgttcgctgtccaaatcgacaagcctgactctataaagaaacaggccagtactcattgctgcaagaggctgtcgacgctacggaaaaaaaaggcaacagtgggaagcaatgggattgcctccccaaatggacccaatggaaggctggagatctcaatgatcgacaacgcaaacggacccagagatgaacccccctccgaaaacgaaagcgcagcaaatggacactagagcagagcacaggacacacggagctactccaaatatgcacaccataaaaaaagaaacagagaaagagatggcaaagatctcgttctccgattcaaggggaaaggaaacagcagtagtcactggtcagttaccttcttcctcctcttcttggacggcgggtggctcctctctcggtcgacagatcctcgccggcgcgcggcggcacaagagctcggaagcgacagaggagagcggctgagctatcaggcgatcgactgccgccttttgggtggtagctagcgaacgagctgccgagcagcgacgccaacagaaacaggacgaagaggagatcttttccactcccccttttccttttcttttctttttttttccgcgagggagagaagcagggagaaggaaggattgagaggaaacgggcggggagcagaggcaggaacagagcgggagggaggggggagatccccggattcgctcgcggccgtctgatccgcccccgaaatcgagcgaaagcactcgccgaccgagccgtcgacggctatttatacaagggagaaaagcgctcgcgatcacggccgtccgtatgtttcgctaggctgcgacggccaggatgcgtggcgcttggttgggggagtggggtgctttggcccacgtcccaggccttaccacgcgcaccgtaccacacctgctctgcgtacgcatttttaacgtggtgcagccgttggcagttggcttgtggctagcggccggcttcgccaccctcgcggtcgcggtggcatttggcaacccgccaacttgtgttgtcgggctcgggccatgcgcgtgcgcgcgggcgacgccaacgtcgcgcctgggaagaaggtcgcggcagcgtgggtgtcggggacgtgtgtttccgccgagactggcagcgaggacggtggcggttttggtgttggaaggcgacatcccggcaatgtcggctgttccaaaattagtactacaacgcttgtttatggaacttgtcgacaggtgatacccgtagaccggatatagagggtattggggtacgttggtataaggatctacgtaatacgacatcaagtagacaaaagacgaggattatactggttcaggccccttggtaggtaatagccctaatccagttgatgtgggattatatggtggaaaacacaggttataaagggaacaatggaacttgagggatccggcgagatcatggtctagttggttcgactagatcctcggcgatttggctccttgcaggctccgacttcgtaggctgtgagggttatgttggctccgagattcgatgccccaggtcctcctcggggggtcccttttatatcgcaggtcaggcggtttccaagtagaacttagagataatagaccctatacaatacattgacgacccagtcttgtccgagtaggactctttccatctgtagactccgtgaagtatttccttagtgtacgcaggaagtatccgtatgcgcgtgggtataccctaccaatatataacatatatcgaagggtaaagggtatgcctaacccggaaccctgacagtagcccccgacttctgcttaaatgaactcgtgtaaccattcgcgacttcttgtgttgagactgttgtcgctcccggtgtgaggaccatagagtcaggacgtagtcgagaacaccgtgtgaagcccaacggtcacgagtgaatttaaactgaagtccaaaaaactgccgcgcgtaacggacccagaaatctccagcgggcatctctcccctttccttggaattcgcaccgtcggaagtgcgtctatttaagggaattttggggatccattttgaagtccgcctagtgtgaagaaaacatcccgcctgtaagcgctctttgtcttctccgctgccacaagaaaccctagttcatcgacttgagccctctcttcggcgatctccgatcagcgatggatctcggcaaatcatcctccaccagtgcgtcgctgaagaagcttcaggaagacggcgcccttcccggtcgcggaaccatggaaagagaagcaggaggtactaatccccagcccgtcttaggtcgtatggttgcgatcgaagactatattctctgcggttttctccctccgccttccgagtttcttctcttggttttgaacttctacggtctttctcttctccatttgaaccccaattctatcgcctttcttagcatcttttttcatctttgtgaggcctacattggggtagagccctttcttgacctctttcgcttctactacgagttgcgttggatggagtccaacagggtgtctggttgcatcgggttctgacttcgggatggcctgaagtcgcgttatatccccttccagtgcccttcttctcgcagcaaatggaggacgaggtggttctaccttcagatcaaagattcggaccctgtcttcgttgttcccgaggaacaaccggacaagatttcgtcttggaccgcaaagccccctttgaccccctctctccagtcatttatcgacattatcaacgatctctgagtacaaggcttgtcagggtatgaagtcgctgcagacttcattggtaggcggatccagccgctccaggctcgaacccatccagcctttgactattccggaccggaggacgcgacccgggtttctcctcggggtatctttctcgcatttatcctgacatgctcatgttcgcgttcctcttgatttatcgaaatttggttctcgattctcaggtctgaacagcgaagccgtggaacgtcgtgttggccaggtgatgatcagtggtccgacaacggcgagtgccatccccgttcccctttgtgagaaaggggcggccgaacatgatgttgccatcaatgtaagtgtgctcgataggcattctacgttttccttccgagatcacattgtgacttgattacgcataggctcttcctctgactgacatcatcgggctgctcgcggaccatcaggtggtggcgtctttgaaagagaaggtcgccaatgaggcgtctgatgctgctgctgctactactacaagtggtggcaatgttccgacaaaggggaggaagttctcctctgtaagcggacatcgtcgcaaggcatcgacccccttggtaagctatcatgtcgtcagatcgtacagccagaagaatttcgccttacttcgcatcgaccgtttttcaggcctcggacgcgtctcccccgtctccacgacgacaacgccttgtgacggttggtgagaagtaagtagacgaacttaagtttccgtgattttattcgagtgttgtctgaaccatggccgtctcacagggcggcgcgggcgaaggctgcgcaagacgagtccggagggacctccggcgcatcgcccgctgcggcctcgatggatgtcatgctcgcactcgggagccacgaggcgacaccaagcggcccagtcagcgatcccgcggctagccgtggtccaccggctaccgtcctcacctgggagaagctccaggttgagatggggcgcctccttgaggctggtgctcgcggcatcggtcgcgagattgcggaggcgaggtcggcggcgtcgtcggcaaacgagcgggctgatcggctggcacacgagttgtcggaggctcgtgaggacctcaagaagatgagggagttggtggccggcaacgagcgacaatggcaggggctcgagcaccgcatgtcggagctcgggaacaatctgtcagaaatccgtggctcgttgcgggtcgcctatactggtcagcaccagttcgccggggagtgcagtattaagtctactatcccggcgaatcccgacgagttctcgctgacatcttctcttgcggagctggcggcggcgatggaggaaatcccctccaagcatgcggccaggatcggggaggagacatcaaacgggatctacaccggggcgtgccacgtccttgcgtgtgtaaagctggcgcatcctgaactcgatctgcgcgagatcttggatcagggggtggctagcaacacgcataaggaggtgatggaagaagtcggtgatctgggggaatctgttctccccctttttgaagagtagggcctcttgtactcgctagatatgctgtataaaactggatcttaaccgcctttgtgcgagcagttattgttccagcttactcttgtatgttgatcttgaaagcttttttgtcccttgtagagatgttgatgacgaggatatccagcagcgcgggcaacccgagtcaccggcgattattccggccctcacgtttgaaccacatgcgtcgcccgacaatgtagaccagaccattgctacggggacggagatggcgaccacttccttaggttagcggtccattcatcccttttgctcctccgattagatcacctatgttctcagaagaggcgtgtagcctgacttagtcgttcccacactgagcagatctcgagagtgctctcgctggccaagatcgtcgtatccaatattggaagacaaaatttgaagtagcaaaactcgagaggactatgcttgtagtgaagaaagagcaggctgtggaaacgctccgaggtcgtgaggtgtggttcaactcatacttgaagagttgctgcacatccatggacaaggtttgtagagagctccgagtacctcgtggggatcccgaggagtccgtggtcgggtatatctcgtggctgaatggggcctgtgcttaacttgatgacgtcggcaaacgtatcgacgaggccttgaagcaggagtgttgtcgatcaagccgatatgctggggggcacgtgttggcttgcctacgggatcatcgcccgcgcctggacctcgattttctctgtgagggttttgctcgttctcggaggactccggcggagatagaccacctggcgaggttgatggcgccgttggcggagaagatcctccagtctatggattggcgttggccttcttggtagtcttcgtatcctgtgatagatatctcaggaaaaaggtgtaatatagctttggatttgtgtaaaaactgtaagaagtattttgtgaaatagaaaagaaatctatctttaacaaatctttcttacttcggatgtcgtgtgtaagagtgtgttctcagttcgcgactttagtcagtcgtttgagtcgtacactctccctagcccccagccttgtcgtcggaggaattttctcggaggataaggctcttggacctttgacctgccttggttgaataagctctgatcctagcccccagccatgaaattggaaacttaatttccgatttcgcggcttggttaatacgcacggcgagaactcttacatgaccagatcttacatggtctttcgtctctatcgtctctacaggatctgacaaggccttatcggctctgggcgtccccagccgaagatcccttaggttcctcggaggccttgtcgagacggcgtaaagggacatgaggataggtttcaactctaggtgtcatcagggtaagggatcatcgggcggaaacactttgattgtaatatgggcctaagaataggctttattgatactgtaaggtgccttacaggtacggatggtattgactcatacatagaatttatgtagttggtcaatgttccaagaatctgttaactcgcgaccctcgccgtctgcaattttgaatgcgcctggccgcaagacttatgtgatcgtgtatggtccttcccatttgggtgagagcttgtttcgccctgcttggctttgaacccgtcggaggacgtagtcgccgatcgaaagtatgcgtgctcggatgcgcttctcgtggtaacggcggagggcctgttgatagctagttgctcggacggcaactcgttcacgatgttcctcgagtagatttacatcgatgtctcgctgctccacctggtcctcgtcggagtgcttctgtactcgtgtactctgatgtcgtagctcgctggggagcatggcctcggagccgtacacgaggaagaagggtgtttccttattagacgttgtcggtgtggtgcatacggcccatagtactgatgggagttcttcgacccattttttgtcatgtgacatgagcttgtcgtagacacgggttttgatcccttgtagtactatgccattcgccctttcgacttgtccgttgctttgaggatgagagaccgaggcgaagcatatcttgactcctagcccgatgcagtaatcctggaaatcggcgctgatgaactgggagccgttgtcggttatgatgcggtgcggtagtccgtatctacagaatatccccttgatgaatttgatggcgttgtcggcctggatttcccccgtgggtactgcttcgatccacttagtgaatttgtcgatcgccacgaataggaacttgtagccgccctgtcctcgtgggaatggcccgagtatgtctagcccacagcacgagaaaggccaagtaagagggatagtctgaagcgcttgcgcgggtagctttgtgtgtttactgtggaattgacaggcttcacatcgctggaccatgtcgcatgcatctttgagggcggtaggctagaaaaacccttgtcaaaaagcttttccgaccaatgtctgaccggcggcgtgtgacccacaaatgccttcatgtatatcaaggaggaggtgtctgccgtcgtcggacgagacgtatttgagaagtaccccgtttggcgctttcttgtatagatcgttgccgaccatacaatagatttttgctttacgggttattttcttagcctctgtatcgtcctcgggcaactcctcgcttgtgatgaacttgattagtgggatgcgccagtcatctgtggtctcgatatcggcaacggcgtgttctgcctttgtggcctctgagctaatgtcgggggcgttcgggctaactttgccgctaacctcttttactgatggctttatcaggatgtccagaaaagtgccgggctcgagcggttttcgtctggacgcacgtcgtgctaggtcatctggctcgatgttgtctttgcggtagacatgtcggacctcgatcccatcgaaccttttctctagcttcctgacttttgcgagatacttggataactcggggttagaacatttataatctttgtgcacctggtttgcaactagctcggagtcccttttcacgattagtcgcttgaccccaagtgtggctgcagctcttatcccggcgagtagtccctcgtattcggttgtgttattggtcgccctgaagttgaggtggattgcgtgcttgaattgatctccggagggagacgtcaagataaatcctgcccctgctccttggctgttgagtgtgccatcgaacgccattgtccatgttacgttgtcgacttggttgtctgatttgttatcaggcgtagtccaatcggctacgaaatcggcgagtacctgggacttgatggctgttcgtggcacaaagtggacatcaaatttgctcagctcgactacccatttcgcaatgcggccgacaacgtctttgtttctcacaacttcaccgagagaaaaagacgagacaactgtgactctgtgggcttgaaagtagtggcgtagtgtcacgccctgataaattcatcccgaaataaaaatcattttctaaaaggaataatagaattaattaaaattcgaaaagaaattggcaaacactaaaatgcgtacaagaaaaattcgaatgtggcccggagaatttttgttaaattctccttggtctaaaaggagccctcaaattttacttgaattttcagagcaccggaaatgattattaagcaacaaaaacaattatcagagtttattaaaaagaaaaagctaaaaataatcctccttttcctttgggccaagtttggcccaaagtcctccctctctctctctcagcccgcggccaaagtctccctctcctccctctctttccctcctctcccgggcctctcctcctcctcccggcccacctcttccctccccctcccggcccactccctcctcctccttcctcccggcctgcctcggcccagcagcccggcccaagccgcagcgccctcctgccctagtcgcgcgcgcacgtgcgccgcacgcgcgttgagcgcgcctcccgcgtgggtcccgcctgtcaggcgcgcccccaacctccagccgccggcctccttcctctctctcccgtgaaccctagcgccatttcctcctccaaatccgtcctgaatccaaccgttctttccaaattgattggggggaattaatccccattccttcctctttgatttcccccgttttcccccttgaatggctcccccaatcgccgggaacggacgcgccaactccggccaccttccatggccgccggccgtgtttcccgtcgccgttccgccctctcccatgcccggctccctcccctccgctataaaacggaatcccctcgctccgttctatcgttttatccccctcccgcgatctcccgtggtctctagccacctccccgccgtcgtcccctctctcccgtgccgccggccgtcttcagccgcccctgccgccgcgtcagcacgccggccggccgtgccgtcgcctcctccagcgtcgcagccgcctcctcttcgccggcctaccatctgtttcccgcgaagacctccggaagtgcatccccaccggcaacagtggcgttgccgccactgttccgcctccggccgcctctgccgcgtcccttgtgcgccggccgacgtcgccaccacctctcccggcaccggaacgccatcctcttccccggccaagccacggcgtcgcccgtatttcgccggaacgccgtcgcgcgcgccgcctctccctcggtctcgtcggcagcccctttcgccgtgccagtgcgccggccgacgtcgccgtctccacctccggcatcacagcggcaaggtcgccctcggcctcgcctccccttcgaccgaaccgctccgcggtccatcgtcgtcgtctccgttcgttctcctcgtcgacgtcccgtcggtctcccggctcgtcgtctcgctgcgcctccaccgtcatcgtcatcgcagcggcgtgttccacgccgtcctcgtctccgtgcagctgctgctagctgtccctcgtcgcctcctcgccggccccggtcgtcggcgtcgtcgtcctcccgtcgttcccggtcgtcgtggcgttcgtccctccgtcgagccgttctcgtccgtcctcggtgtttcgtcaaggtcgctgcagccccgtcatcgtcttcgtcctcgcctccgcgtcgtcaagcctcgtgccggccgtgtctcgccttcgttcaaggatcgccgccgaagtcgttccctcgccgtccgtctccgccgcgtccgttcgtcgttgtctttcccacgcctcgtcgcgtggtggtaaggatctctcctctcgctgccccgtcctcgtcctttcagtgtcgccccgtacccgttgtgcggttgtcaaccccggtacccgtgtaccggtgtcggtagtcgttcacgtgtgcgggtggtgactgtgtagtgtccgtgttagtgtgcccactcggtagccgcgtggtttccacgtgtgcaggccgtgtggtgtctagtggagtccgtttgtcggccactcgcctcggttgacacacggggtccgcttccgtcgacccgtggaccgtctctatgtactcggtctaccgtggtcctttaggttgacatgtggggtccgcatgtcaacagcgcagccttcctgtcttttccaggctagtgcttccacatgttttatagttgaaaaacctaattataataatccgcaaatctccatataacagcactaaacttcggatgatcatatcttggtcatacgaactctgaatcgacccgttcaagtctcctaatgtttgttataacctaaagaaccgtgtgctttctttttatgtattgttattgcttctttataggcttgtagctttgcttgtgtgcttcgcgtagcttctgtcgttccggaggttctcgaagcgtggtttgcggtcgtcgccgaaggttcggaaggccgttctctttgagcaaggcaagtcacatcatccttgagcatattgaatcccagtttataaaattattttgatttaaattaatgcattaacgctttatttaaattcccgcgttatcactgttttatttagccatgcctatttacctttgttaagacattattattgctattgttattattaccttgttcaccctagaataaacaaaaccccaactagtgggtactctattcatggttccactagtatgaatttaggtagatgcttcgctgattaataggacaacattaggtggtttttataactttagactttgggaatattcatatctcttggatactatggaatggttggcttatggtggaattggacatacccctctcttcctctttcaaagcccctaaaacctgtttttcggtggggtttgggtgcatgccagttgtgggaagtagcaccccggccaatataaggattaagctcgggcctctgttgcaaagcactaccgtacttccacatgtctagtgggtaaggcttagtttgtggctcagtctggttataaacaaaagtacacggatggagatggacgaagtcgggggtcgatggacatctctaggacaaatgaaggctacacgagctgcggctcggtagtcgagatgtcatggcacagggctggtgtcctgctgctaggggctcaatcctgcctgcctgtcccgggggttccggctataggtggggttgggtcggtactcttgtttatggctaggatgggttgggaactatgtcacgtcttccgtccgtataccgtggtggtatgtggcatgtggttacacgtgaggaagatgtgtcttgtgggtaaagatgtacacctctgatcagagtataatctattcgaatagccgcgccctcggttatgggcaagccgagcaatgtacccaagttagtgttttaattcttaaaatttgcttaacaactaaaatgtggaatggttggcctgggttggcttgggacgagctgggacccagggtcgggttgccagttcggtctgaatcatcgtaggccttgggttaaggcaggttcgtgagggttcacggccttgattaataatattgtgtagctctaggatcgtctttataaaatggctttgggcaactaagtgacttttaaatgctgttttctgcaaaacttaacccctatattattaccccttgtacccccttgcattaatcatgcatctgccggtgtggcttgctgagtactgtggttgtactcattcttgctcaatcttcccccccccttcagtaagagaagctttggagaaaaagtcttaggtggaatcctagcttataccccagttgagcgcctgtgaagatggagccgtaggcctgctagtccgctgctgtttatttttgattgtcaggccttaagtgcctttgtaataatgtaaatattatcgatataataaagatgtgccttttgtaccatgtttgtgtggtgtaccccggcttttcctgggacggggattaatacactagcgttcgggaaaatgtatttttctcggtcgcgacacgtagcttccttgatgtcatgatgaccacgtaaagcagcttttggatctgtggatatcttgtctttgcgtcgtggagagcttcgctgacgtaatagactggtcgttgtactttctccctctcgacaacaatgacggtgctaacggaatatggtgtggcggtaatatagaggaataattcttcattaggttggggagcaacaagtacaggggggtttgataggtagcgcttgagtgcaacgaatgcctcttcggcttcctgtgtccatacacatttgtcttgtttcttcagcagagcgaagaaaggttgtcctcgttctcccatcctagcgacgaacctgctcaatgctgccatgcatccggttagcctttgtacttccttgagtcttgtgggcgacttcatgttttcgattgtcttgatcttcttgggatttgcttctattcctctgccagagacgaggaaaccaagcagcttgcccgacggtactccgaacgtgcacttctctggattgagcatgaggcgatatcgtcggaggttgtcgaacgtttcccgcagatcgtcgatcaatgagtcgcctgccttggtcttgacaacgatgtcgtcgacgtatgcctcgacattgttgccgagctggttgctaagtgcgccctggaccgtgcgctggaaggtattccctgcggttatcagtccgaacggcatcttaacatagcaaaataccccgaacggcgtgatgaatgctgtcttctcttcatcctcttttgccatactgatttggtggtagccagagtaagcgtcgagaaaactcaacagctcacagccggctgttgagtccaccagttgatctattcgaggaagagggaagtgatccttggggcatgccttgttgaggtcggtgaagtcgacgcatattctccattttccgttggccttccgcactatgactggattggctagccactctggataaagtatttctctgatgaagccagctttgagaagtttgtcgagctcttctcgtatggcttgttttcggtctggtgcaaatctccgcagtttttgctttactggcttggcatcgggtcgcaccatgagtttgtgctcaatcacctccctggggacccccagcatgtcggatggctgccaagcgaacacgtcagcattgtcgcggaggaaggtgatgagcgcgagctcctatttctcgcttagtgtcgcaccgatcttgacggtcttgttggggttggcactggagagtggaacgatcttgattgcgccgtccggtttcggcgtcttgttcgtcttgctcacttacttgggtggcttagtcgttgcgggtgggctgggtgtttgctcgatcatgtcgaggctccgtttgtcgcactgcaccgccaactttgcgtttccttgaatagtgattgtgcccttcggtcccggcatcttgagcacttgatacgcgtagtgagatgcggccataaacttcgcaagtgcagttctcccgatgatggcgttgtaagctgtatcgaaatcagcgacatcaaaggtgatctcctccgttcggaagttgttggcttggccgaaagtcacaggcaacgtaatcttgcccaatgatctggacgaggattggggagtaattctatgaaaaggttgatcggttggtgtcagcgagttcccatcgcgtccagggtgctgatgaaaagaaggttgattgagctgccaccgtcgatgaggacccgtgcgaccttgatgttccgaatagtgggttcaaccacgatcggatatcgtcctaggatgacggcggtcttggggtggtcttcttccgagattctatcttctgttcagaccacttcatcttgggtgtagccccctgccatgtctaacagacttcgcgttccactttcttgtactctcgtttcgaggagtatgttgtggaacccccgaagatgtgtgaaacgtggaggtcagagtctggatatgctgagtataattcctggggagccgcctccgcgtcctttttaaccacgcgtactcgtttgcctttttcagatgcaatgtgcttctcgagcgattttttgaaaacaaggcaatcttccaaggaaagtttgtccgtcttgtgcatggggcaccatgctttttttgtgtcgctactttgtgggtctgggcgcttgggaggattcacgtattttgctgcgaggacttccgcttgagctttccttttcccatttttgcgatttttcttcttgcttgactcaggtgcgtccgtggccgatttcttctctcccccgatcttcggcttatcgttcttgcgtcttagcgcatcatctgcgtgggcgcatcgctcaacaatctcgaacaatctccgagtggttgtgatgtgtcttgttgctaactcctaggtagtatagcgatctctgacaccggatttgaaggcgcgaattacagaagcgtcggtgattttggagattgtatttctgcactcgttgaagcaccgaacatattccctcaaggattcacccgagttctgtgtcaacgcgtgtaggtcgtctttgatcgcgtggcgcttgtaagttccttggaagttggcgacgagctgttgccacaggtctgcccacgaagagattgagtagggcagaagatgcatcagccacgaacgtgcagagccttttaatgcagttggcaaataattcgccaacgcattgtcgtctgctccggcggcgtagagtactgtggagtagacttgaaggaactcctctgggtcagtgctcccatcgtacttttctattgctccaggtcggaatctctcaggccatcggacatcacgcagggaacgactgaaagccctacacccagcgcggggggcggtgggttgtcggcgatcatgtgtccttcgtggatgtctgtctgatgatgaggaagacgaggatgatgacgatgatgatgggtcgcttggttccggcgtccgattacgaggatatcggcctggatctcgagaatcctgtcgtcgtcccccgctattgtcttggcgccggtctccatcatcgtcgtcgttatggcgacgtcctcgaccagtatcgtctggcacccgccgttcgcgatcgttgtgatcgtggtggttgtggcggttatcacggcctcggtcttcgtttaaacggtcccctcgatcttcgttatcagggcgccgtgaagagacatgacgtcgggaatgattctcgttgtctcgtgtgcgtcgtgcctctcggcggccgttgatgtgatctcggagatcgctagtgccgcgaggtggaagggtagctcgctgaggcgattccctccgttcagggttttcaccattggcatcgccagttggtggctgctctgggtgcgctgcggcagcgacctcttcgaacacgttgctgaggttggtcactgattcccgtagtcgctctgtccaacgcgcgagatcgtcgttcagaatgagattgtagggggtttccctcagtatagagttgacgactctgatgtgctgggctggagtggtcaattgattctccacttctgcattggtgcgtgctgatgtgccgacatcatcgatagccaatacctcccgcggcgcgctcattgtcgatgatccatagtcttcgagaaggtgcaagactgatggttcgtgaggatcgatattgattaccccaacaaatcgatctgaagttggcgtcgctcctcggtccttgtccttattcctgatggggatgtgtgactattggaccttaggggatggcgctttcatggcgctgagaaagaccttgcagtctgagaggtcgtgattctttgtcttgtgaataggacaatagacatcacgagttggagaaatacgctgaattccacgctctttgcaggcgcgaatttcagcgcggacgttgaggaaaacccagcaggcttgcaaagtgtgtttcctggttttgtggataggacaccaggaccttgttgcttcggaagtcatcttcctcggctcgcggttcatgtcggaacgacaaggtttggccgcatcagaacccttctcgagctgggatgtcgtcgatgctccgttctccgcctcggcgggaggatctttcgacatggagtcgccttggtttgtagccactgcattcttgtttccggtcattggcggaccggttgagatcggcatcgtggtgcaaaccgggaagacgatttcgccgacttgagtccataccagcatcgttgaagcagggaatacttggctgaggttggcgttgacgctgttatcgactaggctggatgacatagtagtagaaccttgagtaccaagtccccctacctggcgcgccactgtcgacgggtgatacccgtagaccggatatagagggtattggggtacattggtacaaggatctacgtaatacgacatgaagtagacaaaagacgaggattatactggttcaggccccttggtaggtaatagccctaatctagttgatgtgggattatatggtggaaaacacaggttacaaagggaacaatggaactttagggatccgacgagatcgtggtcgagttggttcgactagatccttggcgatttggctccttgcaggctccgatttcgtaggctgtgagggttgtgttggctccgagattcgatgccccaggttctcctcggggggtcccttttatatcgcaggtcaggcggtttccaagtagaactcggagataacagaccctatacaatacattgacaacccagtcttgtccgagtaggactctttccatccgtagactccgtgaaggattttcttagtgtacacaggaagtatccgtatgcgcgtaggtataccctaccaatatgtaacatatatcgaaaggtaaagggtatgcctaacccggaaccctgacagaactcgagttacttctgtactccctccgtcccacaatataagggattttgagtttttgattgtaatgtttgatcactcgtcttatttaattttttttttgcaaatataaaaaacgaaaagttgtgcttaaagtactgtagataataaagtaagtcacaaataaaataaataataattttaaaaaaatttgaataagacgagtggtcaaacattacaagtaaaaactcaaaatatcttatattatgggacggatggagtattttcttttggttttttccgagtgaatttgtgggactgtggagtactgtactgagcacttgtatttttgttggttttaaattagtcttttgcccttcggtccgattgaccaaagctgacttgacccagcggtcgtctcctcttcgacctctctctcattctagagtcattgcatagtgacgaaactgcgattcccctgattctttttcattaacagttcaagcacactagtaaaaagccgttcctttggcaatacggcacactcgaatgagtttgatcttgcggtgtttcttcggagttgaaaaaaaaaggtactcctacctcgctaacgttaggcccgagcacgaaagctaaagataaaagcggcgcattggtggtgcttgaattatagtttcttgatataagatgctcctacaaagaaaagaggttgccatggggtctgtgcaatgggccaaaacacaagcaacacatgagcagcatttgtaactgctgctgagttatgcaggcacggtgtgacaaatcagctttgcatgcttattagtcttggtcattagcaaaagtttgatttgatgcttacttaccaggctaccagctagtagattgatatatctagtgatggcgctggcgcaccacggttggcatgcatgacgtagtcatgataccactctccgtttccctctccacatgttcccctttggcggtaatcaccattgtaaaggcaatcattaggaggcaaccccgctgtctttgcttggtgaccgaggtgattaaaaggaagcaaaggcgccacagcgaagaaataatctattccaaacaatacacttgtagtagtagcagcagtagcagtactgttggatcaagccatgcaggtatatcgagcaagtggcaccattgttctgtgtggcaaccgcctggcagcgaacccccaactgctaggtttctgatcccgagacgaatcacatcctcatctctctctctctctctctcgaattttctggcgcgcgaattttaatgcaggggccagagggggcgcaacggcacacagtaacacagtaagagcaagtttaatagtatagctaactactagctttaattcatctatagccaatctaatagctcatctatacaatagttacatactacactattaatatctggtcccacctgtcatacacactgcgtcttggagtccgtgatatagttggctataaatctatagcccgctgctcttctctctctttatttatctttttaaaatatgtttatagctggcttatagcatactattgtacatgctctaatcacgtcgttttaaacccgtgtgcctctgttgttgccacacgcatccccacggagcgcggtcaaagtggcacatcgaacgcgtcagtgtgttgtacggcgcgtgcagccttaaaccgcttggtctcttggctggctgcttttggttgccttgatcgagcagtgcttgcagtagtacagcaagttcacttgtacactacggagtacgcttgggttgctcgagcagcaacgcaccgctgggctggagccggcgaaagtgaccgggcgaaccacaggctcttgcagcggacagatcgatgtgttcctgagaaagcagcagcaaatctttcacgaaaggaggagaaaggcaaagcgcggccggctaggtcggcacagtttaaagccgcgcgcgccacctaaagccatccccagttggcatgggatggcacggcagcgtgtctggagtgggaatatggttcagccgaagaatttgttttcagtttttggtatttaggttatccaaaactgaagatcaaatcatgctatgaaactattaatatttttttggggccagcggcagatgcctcaagtagattttatgtcaagatagaagaagttcagtacatagaactaacaatcattatctgttatgattcaaacgcgtcccaatcgataccaacccattagagtgaattactacatctctctaaaagttatttttagtgaacatcaagtgacatcttagatagcggactagccaacctagccgcagaccatgcccaccattctccatgaattccccgggctattttccacagccgaaaagttgccaatactaattaatttggttttgtagcttggcttggtattttggttgtcatgtaaatgtttgatagctttaggcagggcgaggagggcgtagacattgggggtacggcgggtggcagcttggctcggcctgtggcaggcgacaccgtgggtgattcatgtgggtgtgggtggtcagtgggatatatgggaggactagtcgactatgaatttaggtttattgtatagggtctattgggctaaaggcttgtttagattattgccaaaatcaaccataccaatatttgggggaaaatatgtagtgcaaaccacatatgtagtggaaacttggaaactactgttggatcgagaaatagatgtccgagattcatccacgtcaccataagttaaaatttaactcctagtaaaattttaattcatgagtgaatctgcgagttaaattttaactcatggtgacgtggacgaatctcggacgtccatttctcgattcaacggtagtttccaagtttccactatatatgtggtttgcaccgtatattttcccaatatttggcaatgccaaattttaatgtatttggacctaccaaaattcataggagttagatgtattttgtttgaagccttaccaaaactcggttgtatttttagtagtggaagtaatattgatagggtaatattagctaaagtatgatagggcttgcagtagcaacattgtaaacatgccataaatttcggtcaattcagttaatctggttaactgaggtttttttttcaatgcggagaggtatataatcaagttgatcgacctaatttggttagccgaggatacaactgaatttatgaccaagttcttcatcttggtctcagtgtttcggtttggtcaatcagttggctagtggcactggcttgcacatagcttttgtccacccaatgtgtgagcaagccagtgccgctagtgaatcgcgcatagatttccagtgaaaatgtccctccggccaagttctcgccaatgttgtgtgaggagagtatttctaatttatctcgagcgagttgagcttgagactagggttttcaatttcggtaaccatcgaaattttgagaatatcatgaattttggtgtttttccatgaaattatttgaaaatttaacatagtttggctgaattcaaacaaattttgataaactgaaaagtatttgaaaaaaatctgaaacttttggacgtgacatgtgcttgctggtggggtaaaactttttaaaaatttcgaaccgaaatttcaagggaaaattgtaaccatgccattataattttgcaaaatttgagatatgacatcctgacccacatgtcattgactcatgtgggttctacatgtctttaagataccgatggtatatctcaaactttgcaaaattataatcgcatgattccaaattacccaaatttgaaaccctgctcgagatcagtaaggcagtaaagcaccactggcaatggggccgtgctgtccgacggaaagcctagcccatctcaagcccatgaaagcataacaaagccccaaatgatttgacaaacgacaatctcgtcgacaaacgataagaagtcgagccgaaagcaatacaactctgcttcagcctcgtctttaccataccagtttcctatacacaattaactctgcaaccgcgacaggttgactgcctctgtagctgtcctcggctgtctttgggtgaccagaagtctagtttgctttcgcgtgtcaaatcggcatttctgagggattagcacgcggccatgcattgcctttgatcggtcgcctagaatgcaggtgcacatacgcgcacatggacgaggatccactaatgtctaatgatccagcaacgggcagaggcatttggtgttttttgctttatctctcgctccgaatcagagccttcgcacgcgtccatgcatcaaaagaaaagactgcgacgcctactcttagcactgcacaagtgtggaccttagtcggtcgccaacgtaccaggctgccagctagtcactgttacaaggttttgatcacgcacaaagtaatggaaacggtattcaaatgtagacacggactttgtcatctcgccaaacaacattccctgtgcatttttattgttgttgctgctgctaaaggattgaccacattcaaaaataaataaacagccagattctgacaaatgataaccgttaacactggtcaggagtatagtatgtggcgacgtggcgtgcgctctcaggtcattcacagtgcatctagatggcattcagctccaacctcccacatccaagattccataccacacatgcatctcccgtgaccaaatgaaaaatgggaagctaaaatgggtcactcgttcctcgtcagtttttgttaggaggggagaagaaatcttcgctcggaggggagagacagcgaccgagttgggaggggcatgccgggatcgtcgtcgccgacctccgccgctgtcgctcagaccctcgccaaccatcgctgtcggcatattcgttggggagagggagggggagaggtgccgctgccatcgacctgtagctgcctcccgtcttctcccaccagatccatgccggtgagttccatgccgccaagctttgtgccgttccgctccacgccggccggaggttgggggagacgcggtggtcggaggagaagggggagactcgatccgcagtcggatccgttgctgcccgggccacccagcgccgtcgcttatcggggaggtgtggtggccggaggaggaagggggaggtgcggcggcagccagaggaagggggaggctcagcggttggaggaggaagggggtggcgtggcagtcggaggagggggaggcgtggcagcggagatgaggaggggaggcgcgcagagcgagtagtgagggggaggcgcggcactgagaggagagggagagagaaagttttttttgtgtggaccccactcaaggctacatagcactgtgaaatttgtggcaaatattattcttaggtgttcttggggctacgtggcagatgaggttcggcaaaatgtgttgccgcattgctaatgccctcaccatttttgagcttgaatgatgggagcttgaataaagtagacacacctgggagtatgtcacgtctgctagtgttttcaggagaagtacatctaccctaaaaaaaacgagaagtactcctacatctacacggctgacgtggtacaaagtggtgccgatctgacagtaatattgtaacgaggccgaaacagaaaacacctgctataaaagggacttctatgtgacttctggcctggtgtattggctttactgggctgtaatgccgtttgctgggtttctaattcatacaagtacttaagtccaagagggcatggtctgtatatgggctgagcaattcctttccaaaggaataagttcactatagatgtctcaatttgtcacctagcgtgaggctagcatgaaattcgttcgtaaaccaaaatacaagatataacgagttcctcaatttacaaaactgtagcatccgaggtcctagataatattatgcctagttttaactgacatggtatgctaagccagcgtgggatccacgtgggcagcgtgggatccacgtgggccacacatgtcagtgcctagcactttctttctcctcctctcccctccttggagcaagaacatgcccaacccaagacccagaactcatctcctgcctatgcccatgcccactattctcattggatataaaaaaaaaacatacccgttgagtatcggatacccatagattttaaaccacataatgtaatatattaatttatatatatggataatcggaaaaagatcctctgacttaattgtttttttagagaatctgacttaattgttgtacagttgagccactgacatgtgaaccataataaagtgggacccatatgtcagtgactcaactgtatgtgtagttaagtcagaggatctgcttccatttacaatcacatttagatatgtatgtttagccaataagtataaaaccacaaacaatcaataccacaagtcataatcattcacatagtattaaatgcgggtaaaaatccgtaaattccacaattacaaattatttcatcacatagaaagaaagcagttgattaagccattaatagtattggtcatgtcttgatatataagaagtacatcatttgacacaaactcctacaaataacaaaaattaataacatatactatcatgtcatcacaaataatttcacgtattccctcactttggcctccttattttctagctagcaaacaataaatatccattaaacatagtgtatattagtatattatgcattaaacattttttaccgtgctcctaacccaccgcatgatacatctaataaacttgaaaattgtaccaggaatctatctatctatctatctattatattattaaaacaaccttgaaaggtggcaccacgttcgctgtgggggctagaaattcccacattaatcggagaaaaagaaaagaagagtccaaatagaaatacaatcttaaaaaaagctgaaattcggaattaaaagtaagaaatattgaaagaggagtccgtataggaacctaatacgagattaatcaaattcggaagaaaaataaaataaaatccgaaattagcaaaaaaaaaaggagaagagttcgagtaggaatacaattttaaaataactgaaattcggaattaaaaataagaaatattgaaagaagagtacatacaggaatccaatacgagattaattaaaattcaggataaaaaataaaaaaatcaaaattagaaaaaggaaaagaaaagaagagttcaagtaggaatacaatttaaaattaattaaaactaggaattaaatataagcaatattgaaataagagtaaatataagaaccaatagtagattaattaaattcggaataaaaaataaaataaaatctgaaattagaaaaagaaaagtaaaatttcaactaggaatataatctataaataactaaaattgttgataaaaataaagactattgaaagaaaataccatctaaaacacatgacgagattaattaagtaacagatctatataggagcagagtggtggaggttcataggacatctaaaaactattaataaaacgccaaacaaaatactaatgacgattaaaacgaaggacgacgggcaggtcgtgaatcatcggtcaaggcggttggcggggcttctagaaagtaaaaaaataaaacccaatgataatcatatttgatttttaaaatctcaattacaataaaaataagaggcagctggcgggtcgtataggagtacaatggcatagccaccgatggttgtgggtcttctagaaagtaaaaaatgaattccaacgatagttatgtttgagttttacaatcccaatggcaataaggagtatgcggcggatgggtcgtagaggagtatattggcagcgtttgataggatttctattatgaaaaaaaatgaaacccaacgggacaatatactctaaaaactataaggtccaatttttaaaggttcgggcgtctaaaaataaaaaataaaccccaatgataatcatgtttgattttaaaatctcaatgacaataaagaagggcggcagcggacgaaccgcagaggagtacagtgacaaagtcgatgatgttttggcggaacttctataatataaaaaaatgatcctaaacaaaaactatgatatatttttaaataataatgacaataaaaagaagatgcaatggacggtcgtagaggagtataataacagcgtttgtcgagacttctagaaattataaaaaagaagaccaacaggacaataaagtctaaaaagtttttagatccaatttttaaaggttattaggagaatgaatagaaacagtggtagattgagctatataataacgaataatatgatagaagtaaagggtgctgatgtgattttcaaaaactatgaaatttgaaacacaaagataataaggtttggcctttcaaaatcttaagacatcgagataactatttaataatttttaagtaaaatcatattaaaacatatataattttatatgggtgctagccgcgcaattgcgcgggccacccagctagttctgagaacaacgatgaaaaacaacttaccatactatcacctaaatcgatggactcattacttttaatcattagaactatatgtagaaaacttaaaaaataaaaaaccacttactacccctgcccactcgcatgctcatgaggtgcacattgccctgctcctcccctctctagctcatgctctcccctccttccttaggcagagttctttccccaacttttccaacatacttccctcgttttccacgtgcatgcttttcaaactgctaaacagtgcgtttttttgcaaaaacaaatttctatacgaaagttgctttaaaaatcatattaatccattttcaaaaaaagtaaatacttaattaatcatgagaaaatacatcgctctattttgtatgcgcggcaggtgagttcccaacctcacctcccgaacacaaccttaatttagatactaaattaatagagaacaatttccaagctacatatctcattctgtcagggttatggataccacatacccagtagtaaccgactaagcttggcaggacccaccatataccaagtcttatacggaatcatacctcatatatagaaggagtttcggataaggaaggacaagaagagttctatatgaaaactataagggctactcggattgtatccatattggtttccttagttctacttagacaaggggatatctatgtgtataaatataagaccccctaggaggagggggcagaccaacaagacacatcaacatcagagataagcctagatagaccctatccagtgcttgcggaggccaacaacagggatctagcgccatctctaatcttgacgagttcatattcgaggaggaagactaccctgtcgtcaactatgtgttggtgatccatgccgccaagttgacgacagctagataggttatcccaattattatacttgtgtgattctaatgaatatagagcaacaccggcttcggccaacaggagtagggttgttaccttcctatgaaggggtccgaacctgtttaaaatccttgtatccatcctttttatctcaatctcgcatatatcctggtaccaatgatctccataccttgcaaataccgtagtcgatacctaaaacgtcgacacatccctaatctatcgataaaataatgtgaaattttgacagcgtatattgagtcatatatcattctacaaacatacacatctaaattaactagcatggcggcccgcgcagattgcgcggctagcatcattatattttctctcatataatagcatatctgttttctcattatattattaaaatatattacaatgacaacatagttttaaattttgcaataaccttacgaaactactaatgtgtaatattcatattgtattttatatacgtgttagttattaattttttttaatatcaaattttagttatttgtaaattatatatattcctatatggactctagacttgtcttttaatattttttaattctgattttttattatttttaattgtatttttatgtggactctaaacttatctttcaatattctttaatctttaatttcaaatttcagttacttctaaattgtatttctatattgactttaaactcttcttcccatgtttttcttaatttcgaattttagttactttttctctgattaatgtgagaatttctaggtcatgagagcgaacgtagatgcacctttttattccgaattttagttagttttaaattcctatacggcttatggactctatactctacttctaatattccttatttttagattccgaatttctattttttttcttaattgtatttctatatggattctatactctacttctaatattccttatttttaattccgaatttctattatttcctaattttatttctatatggaccgtatactctatttctaatattccttatttttaattccgaatttcaattatttcctaattgtatttctatatggactctagtctcctcttctaatattccttatttttttaatttcgaatttcaacaatttctgaattgtatttctatatggactctagtctcctctaatattctttattttttaattccaaatttcagctatttctaaattgtatttctatatggactctgccttttctttttctctaattaatgtgagaatttctaggtcatgagagcgaacatggaggttcctttttttttccgaattttagttagttttaaattcctatatagactctatactctacttctaatattccttattttttaatttcgaatttctatttttttcttaattgtatttctatatggactctatactctacttctagtattccttatttttaattccgaatttctattatttcctaattgtatttctatctagactctttactctacttataatattccttatttttaattccgaatttcagttatttcctaattttatttctatatggactctggtctcttcttctaatattccttatttttaattccgaatttcagctatttctaaattgtgtttctatatggactctgtattttctttttctccgattaatgtgagaatttctaggccatgatagcgaacgtggaggctcttttttctattcctttaattatataatagattctacaatatcccaacaaaaattacaaattcaaatatgaaataatattttatcgaaggacaacatccctaccctttcatatgatgtgaatcaacataaaagtatgaaacaattcaataacgcatgttaccgcatcatacatagtttttcaaacatttacagctaattagatatagaattaattcaagcatgattagtccaagtcacgacatagaaaatttggtgcctttagttcaaggaaagatccaatcactctatgaattttttgaaatttgctcgagtaatcaagcaagcctaatagtccttatgtcccaaaataagaccaatacagaacatgaaaagactaaaatacccttactacatcaaatcctaatgcaattatgcctctatttttatctatccccaacatatttatcctctagttcaccaacttcgatgtaatgattactaaaattaaacttatttggaaacaaaccggatggcccaaaataaagttattatagaacagagggagtaatcttttacgtaagtcctctaaaatatgttctatgttccaatctttttttttgagaattacacagtacaacacagatactcacaacgcaaacacactcacctctatgaacgcacgcacgcacgcaaaccctacccatatgagcatcttcgaagactaggccggtaaatccttgagattgacgaagtcatcataggcgcttcgctgtcgacgagtacgtctcctactactaaaagcacaactccgttaaatcctggaaaattcgctcgcttctaaataattatctaaacaatgttgttgagcattatttaaaaaaaatcatactttttaataatggcataaataattcggttgattttctacccttataaacgcaggtaaaatacatgcccgagtatttatacgggttacctttatagttaattttaaaaagtaactatcattacagacacatgattatatattataggatttttacataaaactgtgtatttccttaagaaaacgtacaatctaaaatccgtttattccggaagtggcctaaacatatcaggtgcccacctggaagccaccgacgtgacataagtataggaggcagcggcacttcccgtcttccctttaccttgcaccttaagtaccagccagatcgaactccaatgcttgatccatgatatggtaaaggcaagcacaccaccactaacacatgacatgatacggattagcttgcaagctacccatcgcgcacgttgcccagacacgacggattcgttctatccaccacactccaaaaccccagacacggaccgagaactcaaaggccaacccaatccaaaccaaccgcggtgcccccactccacccccgcacactgaacacggtacagctgttgccgcaacacgcacggacgctcggtcatgctcaccatcaaattttgccggaagatgcgaaaccaccgagccgacgccgagccctttccgcttaaaagcggcctcgtccttccgccccgaaacaatccgcggtcacatgcaccgcccaactccccaccccacatgccccgcgcccgcgcccgcccgcgcatcgccacggacgcgcaaagcggccgcatgcgcaagcctcacctcgccggcaggtacgccgcgaatgcgcttcgaatcctttagccccattttgattcaaaggaaatttacaggaattttaaaggatttcattcttataggatttttctatatatccctttgaatcaaaggaataaatcccatataatcctatgaaattcttatagaatgcctctttctatgtaagaatcctttgtgtttttcatgcggctcaatcaaacggtcattcctatgtttttcctgtgttttgtatttccctgttttacacttatatttctgtcaaaatcctatgtttttcttattactttggttttttttcattcctactattcaaaaggcacccttagtgtgcatcatggccacgtcgccgtcgtcggttagtagtactacgtaccatcaacactactactatctcgcaatgataaaaagggagggcgggtgtgcgagggggtggagcccatgtcatgcaggggccgtggggagctggggcaacgaacattacttgtcacgggctccagttgacaaaaggcaaacggatcctgctgcccgatcgtgtttttggcgaaaaggagccatgggggccatctcgtccgttttgcgcgctgctcgctcgtcggctcgttcaagagatgaaacctgtctatctatctatcggccatcgcaagcaaagcctctccacttgcaaaaggaactggttagtaggacactgtcatcatcgggaaaatgaccttaaaaagcatgagcctcacgttgctgcactgatgttgacggcactgttgagtcgacaaacaggagagcatagcaagcagaggctgatcagcatttgggaagtaataagatgttactagcagtaaacatcaaggaaaacgttgacatctcccttcgtccaaaggagaccacggagtttgatcgatttcacacgcaaatctgacaggggaacactggtaaattacagaagcatagaatgttttgctactatcgtacggtgggcgcgagcaggcagaaaatcgcagagcaagacagcaacaaggccagtatgagttcactgggcagcaggatcatcatccacgcagcattcagtcacctgcacacagaccagatgacgttttcagtaagaaatcttcagacattgcaggatacagacataaacacgcacgaagtaattggggggagatcaagtagtcgtaccattagttgatcgagaactggccgccgagaagtcagaggatgccattggtatggagatcgacagttgggtgcctgagaatgacgaaagattagcattctcatcagcgaggtctgaccatgaatcccttccctttggccactcatcaaagaagggacgcagcgtctggttctcttgcttcacagaatcgacagccgcatagtcgttcccaaagaacgaaagtggctgcctctgaacctttgaaagtgagctgggggtgttctgaccaaggtcacttagtgcccccagctgagaatagcttgaaaggggaaatggcgagttctgagatggcagcagccgccatggattttcaatagatgtgttgatagcttcagtaatgagttgactctgctcatccgccaaagatcttgtgccataagcagtatacctgaatttgagaagatacagtgattgggaattagtaggaaacacgaatgcaagtgctaggcatgtacctatcgaaaatatgtcaattctaactttttagaacagaattaggaagaaaatattcataagggctcaattgtaagaatgaaataaatccatgtaccggaggaaatgtagttaacctaagtccgacagataaactagaaagaatccaaagcattattatcatacaaaaaaaataaaattaccttttccaaaagttagtattcttgtcatgaattcatataagaaaacatagaaccatggtttaactaatcatatatagcagcagatcatggcccaagaaacattctattttgcagtaaaaccagaagacagtttagttgcagcagcaagtcagctgaaccctaaacagttgatgacaagagcagaaagaaaaaaacaatcaaagactaaggtgaccgaataattcaataactaaactaaaccaaatcaacacgaacaagcactgtagagttatacatttggtgaagtaaataatgaggctaggtactaaggtcagactgagattcaccgaagataaatcaaagagttcctttttttttgtagggaagataaatcaaagagttgcattgttaaaatctaatcatcaacattggatgagtatagagttgacttggagcatcatgcagctcacgctggccactggaaaatgtttcaggtatagtggtgatcggtgagacatcttcagagacagtattttgcaagggccaaataattgactgcccctgaagagcagagacagaaacaactggattctgtggaggaataaagaagtggagtaaatgccaagggaagccatgatcagctaccagcaggcacaagcactgcgagggcagacacaaatatgtagtagtatcatctttatggacagtacatgtttcaaactactgggccaaagccatgttaagaccctgcaccccagtttcacctgagcagaaatctcttatggagactgtccccggcttctggggctgaaaactgataccagaaagtatgggaagggcaaagaggcagcactctggaaacctaaacataacacaaatttttgcagtgcagagagtaaagtttcagactttcagtgattgcagcaccaaatcgaagtagtactactgagcatggacagctgattcgattgccaccaatgcaaacaaatgggacacagttattaaccgatcacaatgaaaaatacagattcataactgcatccacctgacaccaatcagttagagcatggcaccttttttttagacaacggaaggatacatatcatgattcaagacagtgctaaacaagtaaatatggcgtttgattaaaaaaaaagaaatgaacaatcacctgagatctttgcctgttccaccaccaacagctgcataaggggcagcattatccatgtgcagctgagaacccaacgccgagccaaatgagctgggcatgttcctccccccgcccccgccattgctgccggcaatagcagggtaaagagagtggttttggaagctgctgccattggaggcagcagcaaggggcgccgccgcagaaccgacaacagatgagggcggttgggactgggcgaccagctgcgtttccacaggctttcttgaacggttgcggccgcggtgcatgtggcgctcgcagtacttggaatccggcgcggcctccttcgagcaccgccatttcttgccgtccgtacgccggcaccgccctggctctgggtccagcttcttgccgaagtacggaccatatccaactgtacaaaaacaggcacatcgtagcaaccgtgttacacacaagaatgcatttgttggtaatgcattttgagttcctaatagaatggcatttgaatatttgagaagtccatatccgatccatatgcagggcatagttatctgttcttagcaatcgctcaaaaatggcgagcaaaaaaacagtttgccagggtgttggttcacagagaaaatggcttatcccatgggcatactgataaacaaaagattttatttcagacaagagcgtgtgcacgtcctctatcagatcaaacagagacagaatgatgggcaaacttccccccccccccccccaaaaaaaaaaaatgatgcgctaatcgtgaagcgagcacgagttttggatttaaaaacaagcctttttattaccaaatccggaggatagcataaaaacacacacgcatgtttcttgaatcgcgtaacccggattaacaaatgacccggagccaattaacaaatggaagcaaagtacgcctgatcggaataaacaaagaagccgacactaaacaagcatccaaaagcaatgcagcgatggtagaggagaggcaagaaataggaacacgacgtacgggcgggatggttgtagaagcgggcggcgagggagtcgagtccgcggcggatggggagcacgagatccggcgggacgggcacgcctgccaccaggtacttgtatatgagcgcctgctgctccagctcctcgtactgcgccgcggtgaacggcggcagcctcgccgccgccgccggcggccacctcgcggtcatcggcgcgtcctcccccatcgcgacgccaccaccgcccctgcacccacccacccacacacaacgtctcaccgtgttgtcacatgcaccactggagccaagaaaatgggttgtagccgcgggttcgcgttgcttacgcggagagcggggtggagcggcagaaggggaggagggaggcggtcgcggctgccggggacgagcggtggtcggccaccgccggagacagggaggcatacggcatcgccatcccttccctctctctctctcaatctctctctcgctctcgctcgctcgcaacgcaagcacacgccgcggtctttagtaatggtgctttgcttcgctcgctcgcgcgcgcgcctttattgcgcggcttgtctctctctctctctctctctctctctctcccgctgcgcctgcgagctctcgaccaggggcgaggagtcgcggacgtcgagcccgacacgagaaggcgcgctccgacccgagctagacgacaaacacctgcctccccccgggcctgtcgacctagcggacgtagcggcgtggtacgagcagtagcatttccattttctcctctctctctctctctctctctctcgttatctcgtggcgtagtacgtacagcaccgatttttcttcgagtacagtgcgaggctgcgtttgtgtttggtttgctgtatttttatttggaaaatgggggaatggatggatagatggatatacatgcagagacgctgtagtgggcagcgcgagtagtgacaagtattgcgtggggggagagaggatgggggaggggggtggaggggactgtcgatttgggctgttccattgttgcggttcccaacgccggagcaataaaaaggcgatgagaggatgacggagcaaccgtcgcagttgcttttcgacctgccatttttttgctactgttagtctgctgctccaacatcttcttgcgtctacatagagcgtgtgcatcggacatcttgaaggaaaataaaaagagttttgaattcagggtgtgtttagttcacgctaaaattagaagtttggttgaaattgaaagatgtgatggaaaagttaaaagtttatatgtaggaaagttttaatgtgataaaaaagctgtaagtttgaaggaaaagtttgaaactaaacttagcctcggtactactccatagagatcgaagacatgcaaccgtaggtcaatgaaataaatatatgctcatgcactgttgccatcgataatttagttgtatgcatagaaattacattttatccatggcaattttggaacaaagtatttttaactaaaattttataggatcgaaattctataggatttttttttctgttgagtcctttcctccactttttagagaattcaaacctaacctcaaacctcatgatttaatttcctttgaagggcttatttggtttataggattttcaaattataagaataaaaattgcaaggagttaggtggtcacatgcactctagttcttataatttttttcaagtatgtcttacctcgtactaaaaatcctacaaaataagaaacttagaatgctaaaaaaagtgcttaaccatctcaagtgcttgtatatacgtatacagactcaatttatatgtatagatttaatagtattgtatgtcaaacgatgcagtcaagattacaagatataatttggaaattctgattttgggttatacgatgaacaatataaaacgggagagcagtagtaatagtagtttgtttcagtttgcttgccatgaggcaattaatcactaccaggtttcgagttcacaataatggtgtggtacttctctgttttattcgacgttggaatacctcaaaacagtgtactaatatactattactacctctgtcccatattacttgtcttcttgagtttttgtttataatttttgatcattcgtcttatttaaaaaattttggaattattaattattttgtttgtcaattgctttattatcaaaatactttccatatgacttatctttttttatatttgcactaatttttcaaataaaacgaatggaaacgtccactatactaggacggagggagtactattactactacagtaccacaagatcagtaacatgtggagctggattgacgtactataatgcagatgcagattttttattaatattatttggtgtgggttatctgggttttagttcttccagtaacattttccaaagactaatcggataaactgcggttgataaatcgtaaaaaataaattgcaaataaaaaaattatatctataatactagtggtttgaaaaccggctgcaagaaaaactacgatgaaaagaaaacttagaataaacactttaagttctaaaacttaaattaggccttgcgtagtttccaattttttttctcaaaaacattacatcgaatctttggacacatgcatggagcactaaatatagataaaatgaaaaactaattgcacagtttgtatgaaaatcgcgagacgaacctttcgaacctaattagtcgatgattagccataagtgctacagtaacccacatgtgctaatgtcggatttattaggcttaataaattcgtctcgcggtttccagtcgagttatgaaattagttttttcattcatgtccgaaaaccccttccgacatccagtcaaacgtctgatgtgacacccaaaattttctttttcgcgaactaaacaaggccttataagccaataagtaaattgttagacctatgttcaacgaattgactagtttattagtggtcgaactgtatggagactcatgtccattaatgcatttaccattttggtcgatttgttttaccttcaatcaacgtataaactgataaaaaaggcgaggcacctgaatttttttcaaaaatcgggcgctgttccatcaagtagaccggaattgtttcattaaatagattgaaaacgtttcaattgtttaaaaagcttaaactcaaccaaaccacctcatggaacattttacttcaaagtatgaaacaaacggtttccaaaaaatcaggtgttgttttaccatatataaaataatgtttcagcaaatagcaaaaggatattttaattcactgcaacatttgatctatacatagtgaaacatcacgagtacacttgatgaaatattgttggtgaaacaaaagttgaaatgatccccttaatagagcgtttccataatacgtgggtgatttgttgcaacgacgcatgtggtggggcgtgtggtggggatggcgcggaggtgcaggaagcagcgggtgcccgatttttctggcgttgatcgggagcccgattactagcattttcctagaaaaggcagcggatagttctcttgcccctaaagtaaccaatataaatgtaacctagtataggtgtgacgtactgacctatcctaagaatatgaatctggacatcctagaatatatcacatatgtattaggttgcagttatattaggacgaagggaataataggaatatcctagggtatgtctgatttcgtactctatcgaaatattggtagtgccaaaatttaggtaagttttggcagtggcactgccaactctttcgttgggtaaagtttatttagtttgctactagttaaaaaccgaaactttgattaaaatctagaaagtttcaaattgtatgttagcaatggtaatgatgtgtcttcaaaccaaaacaacatactccctccattctataatataagacacaataacttttattagatgttccataatataaggcatacatgcaagtatgcaattaactatgacaacttctctattaaattatttttttttaaatcctccactttcatgttatctaatcctattggatgcatgcattagtatttattaggatgatccaaactaccagatgataataattatttcttggtctttggattaagggtggttgtgccttatattttggaatggagggagtatctactaagtactactcactctgtcccataatataagggattttgagtttttgcttgtaacgtttgaccactcgtcttattcaaaactttttgaaattattatttattttatttgtgacttactttattatctacagtactttaagcacaacttttcgttttttatatttgcaaaaaaattttgaataagacgagtggtcaaacgttgcaatcaaaaactcaaaatcccttatattataggacggagggagtaacacatagttgctgagattataatcgaagaagagcaaatcttaagtttagatagcaaacgtttacacgtttttcgatatctaggctatccaaaatctttttttttgggacaatacccacggcagtccctcaaatttattccaaggtcaatttattagtcctttagttccattttgttcagacataccctttaggtttgtcatacagttcaatatggttcttagtcccaacaaaagtgccatgtggacataagcccataccctaaatcttatgtaagatatatagtgaaaagtgtctagctttacggttataccacataaaaaacaacaataaattttccatgctttttggcctgatcaaaggaatcgatatgtacataaatttgaatatattatttacatttgatgactaaagaagtaatagattttgagtatatatatgcaagcgaagtgtgtagataattttgtgtggtattagtaaggataaattacacattcagatatagattttgtataagatgatattgttgagatatcgttttaagtgcagggttgaaagactgtattagaccttaagacatgtttttattaaaaaattttactgaacgaaacttttgagaccaaacattcattccgccattaaattttggacaactacttcaatgtattaattaagtcttagagctgattcgaaaatttgtcacttattttagcactatcaaaatttagagatgtgatcatcaactatggtatcctcctctttaattttaaggctccacctgtcatacacacatgtatcttggagtccatgctgcaactgtctacaaatctgtagtccgctgcttttctctctcctcttttatctccttgaaatatgtttatagctggcttatagtctgctggtgtacctgctcttattgtgctggtaagctagtaaactaacttttgatgacacggtgaaaattgcagccgaccgtaggcgttactattgatcttgctctaataacccaatgtaataagggggtggggcttatagcccctctctcccaaacaccccctaacacaaccggctgggactcgtcacaatttgtttggaggctgtattagagcaagtctaatattaccgtccactactaactccaattcatctgtagtcaatctaatagccaatttatacagtagttgcttactatattatttatatatggtcccacctgtcatacatacagtgtgtcttagagtccgtgctgcagctggctacagatctatagtccgctgctcttctctcttattatttatctcgttaaaatatgtttatagttcgctaatagactgctattataactgctcttacgttccaaccgttacaggtatcatcaatgcgcattgtgttttttctcacctgcccaagatcgcatcctgcaaagagcaagagcaactgcccaactggcaagagctcagtgtagccagtagtactaccaggtgctcctggaaaaaatgttgaatttgggttcattaattagcgaacagactagccagacaacctgctgccctgctctcaagtttctatatgggcagttaatggcctttcaaaaagcgtactacctctatttcaaaataagtatagtagtaagaattcatatccaacgtttaaccgtccatcttatttaaaaaacttataaaaaatttaaaaattaatcacacataaaatactagtcatatcttataataataataataataataataataataataataataataataataaataattttaaataagagtacacttggttagtttttctcccccggcgccagcttgagtgacaggcacagcggcactgttacaatattgccgcgacagtgccaactcagactgtgtttacgtcaaaattaaaaatttaattaaaaaaactagaatattaggaaatgatctaatatcaaataattaggaggggtgaggctttaaacccaggtcgtctagcccaccaccttgtggagctagccggaagacccctgggcatttctcaaaaaaaaatttaattaaaattaaaagttttaaaaaaagttaaaagtttatatgtgtagaaaagttttgatgcgatagaaaaattgaaagtttaaagaaaaagttagtaactaaacgagcactcacatgacaaaatgcgtagccccggaggacgtttaacgtgcttccaccgtagagatgccgggccacggagacgagcacgacgacgacgtcacgcggaaccgcgagcggcgcgactttttctggccgaatccatgtgggagtcgccgtgacgacgacccgcgccgcgcgagcccttgccagagtcgccgcgccaccgcatcgagtaattcgttttctttctcttggaaacgtgcgtttccctgaacacgaagctggatttgtttttgctccccatgctgtactccggggtgatcacagaatcgcaagaacggacgtcagcacgctggtgcagcgccggactgcatgaagatgaaggactagtaaaaaaacatcaactcccagattattttgggttgaatttgcatgcctgtgttgcccgtgtactcctagtatgttcctaccaggacctcgccggtgtcagctttgacgaggaaacggaaaaagaaaaacaaaaagaaacaggtaggaacagtgcatgcatgcgacccagctggatcgctcggcaccacccagatatcttttgtgcagaggggaggaagggaaaagtaccccacgcacgaaaagaaaaaaaaaatctaagtactgtaccactgtgatgcacagacggccaaaagttttctctcgcagcctccctcgcgccgtttcaccgagcaggcaaggtatcaaaccaatcgacggagcaggccagcaggggccagggggagcagcacagtagcggaagctagcggatcggagcagcagtaacggtgtaggggcacagtagcgaagcgttgcaaccgtgtcgcatgcatgcgccgctgctgcagcgagccgcgcgacggcgaggtcgccgttgacgccgcatgcatctattgctgctcgtcgagttggcaatggcatatggcatcggttggggctttgcaggacaggtggtgcacgtgatggggagggaggaggcatgcttccctatattagcccagctacgggggcgcaggcgctagagtaggatgccaatgtcacgtcacgcccgctagctatagctgcaactgcgtctgcgtctgcgtctgcatgcctacgcttttctctgctccatccatcgtgacactgtgtttcctcagggggagagtagtacctctacctgcaactgctagatgcgtgatgggccgatgcgccgcagagatataaaggagcacttggcttttcttccccctggccaagacgggtcccgtccgtcgatcgatccatttcttacggtccaagctcgttcacatgaagtactagcctggatttattatatttacttaaaaaaaactagcaaaagtgcccgtacgttgcaccggacgattacgaagtgtgtacagtgaaaaaaagcgttgtttggtttagacatttaatatggtaaaaaagaattgtttgtttttaaataaataatatgctttatatttgcggaatatacatgatgtttagtttggatgatttttagcatgggagaaaatggatggacgaacaatgcacatgtagataaaaatagattatttagttggagttagtacatttttttaagaaaaaattcccgtgcgttacaacaggaaagatttagaaaaacaaatgaaatttggaattaaaaataaaagaaatattgaaagatgggtttagagtttacatagaaataaaatttagaaataatagaaattataaattatactggatgagaagtctagaatattctccaaaagagggtagagtacatataggaatacaatttagaaaaagaattgaaattcaaaataaaaaagaatattttttgaaaataaacagtcataaacaattaaaatggtattaatgctatttctgaaaattacaaaaatacttaaaatcaataagagagaaaaaactgatttaagcccgacccaatagagcggccttctgtgcttcgcacgtgcggtcggccccataggttggcccaatagcgcggcgacctaaaacgtcgctcggcccgacgtgggagaagcatggaccgtccgatctgatgaacagtctcgattgatcctaacctagataaatacccgtaaccctaaccttaaccctaaaatctctctctctctctcgatcccctaacacgctctctctctctttctttctcgtaaagcaatggcgccggcggcgactattccaacaggcgatgatggcagcggccttccccaccgagcagcggcgacgaagcttctcggtgacgtgttggcacatcagatccccaccatagcgtcggtcatcggttcagaatctagccccccgagttcgcaacctccattgcagcgaggtggcgagaagcagcacgtgatggcctcatcttgtggtaatatttttgatgttctttgatttcgatttatatttggactgtgattttgtttttaattggattgtgatgatttcaatttttagataatatttaactattcattttattcaattgtgtaaataagcaaaagtataagtcatactaaaaatatctttaatgataaaaccctaacaatcgagccgagtcggtcgagctggcggggcccacgcgagtagataaggatctatctagatccatccagtcgccgcccctccccattctcgcccagccctccacccctccgccccctccccccacttccctcctcctccgccccctctctcagccggccggccggctacttccctccccatccatcccccctctcctagccggccggccgtttccctccggcgagcagaccacttctcctcccactctctctccacttctcccccctctctctgcggcggcggcgggaggggcggcatggaggcggctgtggcccggcgggggcaagaggggcgggccagacctcgcttccgccagatccagcggcatggaggtgcggctgcggttcggtggggcgggagaggcgacgtcgtcgtctctctctctctctctctgttcatggtggggaggtgcggcggcggtggcggcggacgtcggccgccacctcgcctccgccagatccagcggcatggaggctgctgcggtccggcggggcaggagaggcggcggcggcgtctctttctctctctctctctctgttcatggtggggaggtgcggcggtggtggcggcggacgtcggccggacctcgcctccgccagatccggcggcatggaggcggttgcggtctggcggggcgggagaggcggcggcgtcctctctctctctctctgttcatggtggagaggtgcggcggcggtggcggcagacgtcatggaggtagtgggacggacggtgtggaggcaggcggccgggcctcgcctccaccagatccggtggctgcggccgggcggtggcgggaggggcagcgggccggacctcgcctccgccagatccggtggcatggaggcggctgtggtccgacaggggtgggagaggccgcggcatcgtctctctctgtgtgcatggtggcggtggaggttgatgtgttcttggttgaatgttttgttctgtgtgttattgatggaatgtttcatgtgtgttttggatgaatttcgactgggatttttcttgggggcagggggcgaacgaaaaatccctgcatttggttgtgattttgggaattgattcccttgtatccgggatttgatttgattttgtgagtttttttccttgtatccgattctgagagggattggagggatggggattcgggggctgcgggcgaaggcgcaccgcgagggacgaaggtgaccttcgtccgacttgtgacgaccggaaaaatccaaatatttatattagttatagatatactcccacatactagtataacaacttgtaagggggtgtttagattcaggggtgtaaagttttagtgtgtcacatcgaatattatatatggtgtcgcatgaggtgttcgggcaataataaaaaaaactaattacagaatctgtccgtaaactatgagacgaatttattaagcctaagtaatccgtcattaacaaatgtttactgcatcaccacattatcaaatcaaggagcaaatagacttaaaagattcgtctcgcaaattagtcgcaatctgtacaattagttttttaacctatatttaatacttcatacatgtgttccaacgtccgaggtgacatagtgtaaaatttttggcagggatctaaacatgcctttaagttctaacatttaaaatttataccaaaatataacatttttttagcctacaactcttctcaaccaagccattcaccatttaaaattttcacttaaatccttttctcaagcaatcataatctttcccaattcaattccaccaactttcttaatacccttgtccaaactaaaactttttacatctcaggacagagatggtatttcacaaatatattgctaaaaaacttattctagacgccagtaacctagtgtcaacattcatcgccacaacaccaacgatgctagcaacgataacctaatctctctagcaacgataacctaatctctctagcaacaaagatgcagaggggtcagtcctagcacagaggatgtatttataaaatattttttttgaaaagggttaaatgtaatttattttttacaaatatatcctcggtgccaaagaggttggcactgaggactatttgtaagaaaaacattattatccgtttcaagataagtttatttttcatctatcctggacatactaatacaaaactaaaaagactagaatacctccttttatcgaattccaatataactattccttactttatatactatcaatacgtcctagttttcacaaactctaattcaataattactctaataatgattttgaaacaagtgagatgtgctaaaaatgaacttattgcagtacggaggaagtacattttaagccttttttgtttttttacaaataggcccctgacatcagtgtctttagcaccgacccctttcacatcagcaattagctaccatgggagagggtcgcaacgacgtcattagctcttagacatttaaccttgacacaatgatcctatcaccaagaaaaagatttatttctgaattaagtattttcataaatccatttatataagaagtttttaaaaagaccaaaatattttttaaaaaaagttctagaagtaatactattttttatccccatccaaactcccccttaacttgagagtgacatatgccatactgacccatcattcagtaactcggatgagaattgtgttctctataaggatgactaactattaaaaaaaatcactggcttcgccactctcatgttaagggggagtttagatggggctaaaaaaatttagtccctgtcacataagatgtttgacactaattagaagtattaaatgtaaactaatgacaaaacccatttcataaccctggattaattcgcgagacgaatctattgagcctaattaatccatgattagcctatgtgatgctacaatatacgttctctaattatagattaattaggcttaaaaaattatctagtagattagctcttatttatgcaattaattttataagtagtctatgtttaatactagtgtctaaacgtctgatgtgacatgaacacgtataaaatcaaatgtcccgaatgcactagtggaccaggaaaaaaaatcatgactgcataacgtaatttcacaagcataaaaactctttttatatttatgccctattccataggtgatctttaaagccttttttttttatagattttgggtataccgatgtatatctggaaccactccttgggtccattgatccttgggtgaaggtttgcaatattacacggtaatctctcagttaccatggtaaataatgttgtcaggatcgggagattaaatatgatttttttaatctaatacactatagaatggttgatgaggaaactatattacgatctttcgatatgtattgataactctcgatttgatgaaaacttgacataaacgatctggcttctgatcaacatgatctgaaccctacaatcgcaaaaccacatctcctctaggtatcaaccgtgtcgaaacccgattgacctcactgaaaatactaattcctacatgcaaatcgaagaacacaagcaagaacaatatagaatgcaacacaattgcatatgaatgattaaacacttgaatttggggttccacaaaccgaaccagcggcaaaactgcaatgacagaaataatctaagcaaaacccgactctaaacgatgacgactactgaataaatatgattagggatgtcctagggttaccctagggcgcacacccccttgggtttagcccacaacacaattataaaacccacaacccaaatcatattcagactggatgagatacgtggcttgcttagcagattgctgacagctcgatgaaaattttgacgtgaaaccaaaactatatgaaagtagactctacaaactttccaacaagtacttatgagccccgagattccttctacattagcggctaggtccatttgaagttgatgctgtcaggaggtccgaatccgaatccagaacgtgtagaacttcatctcttgccttctatgaaccaatagtgacgtggtgaggtaacagtggacttggagaggttttggtttggtccccaatcaacttctttgatcatccatgcattccttacgctcggtctcttttccttcatccaagcaagtacctttgcaaacaaaaatacacgaaacttatggtatagcaacttttgttcaaatatataactagtaaatctaatataaaacatatgcacctttagttgataaatacataagttactcgggagcgtatcatatgcacacaggccctcgcgtgtacacaccgtgtacaccaactaaaaattatcacaaaaaattctaggaaaattcatacatgtactttcaatagtattacatctacgtgcaaagtcgcatcttcaaattcattctacatagagaataacaaaaaagataaaattctgacaaaattacaaccttaaaactgtcagattttttgttttttttgttacggctaaaatataatgaatttgacgttaagattttaaccctaggtataatacaattgaaagtatgggtatgattttttctatattttttggtgatattttttagttggtgtacatgtgtgtacacgtgagggcctgtgtgcataggatatgttgccaagttactcatagtcatatctaagctagtggtgtccttatcgatagtacagttggaaagatcgagatcttatcatgtttataaagatgaagataaaatcaatgcatacaaaatgagaaagccattagtgcatgattaatgaagtttcaagtattacaagattgaaaagtaaatttatttgttattttaaggtaacttatatataaaaagttctataagaaacataccgtttagtagtttgaaaaattatgcaaacgaaaaccgaggtaaaatccacatcttaaaaaactttatataagatttgtagtacattgtatgaattaaagtctataacattgattttgataaatttgatcgattttttttaaaaaaataagtagaggtaaaatccacatcttaaaaatctttatataagatttgtaatacattgtatgaattaaagtctataacattgattttgataaatttgatcgatttttttaaaaaaaaataagtagaggtaaaatccacatcttaaaaatctttatataagatttgtaatacattgtatgaattaaagtctataacattgattttgataaatttgattgagtttttttaaaaaattaagtagacttatttacattattttaaatccaccttaatttaaaaaatgcttacacatgatcaggttcctatgtaagatcccgtcggtcttgcgacatcatatatgaaactcaagatactataaaaagatatctagtaggttcagcattgttttggtttggtagaatcgcaatatcatagtcgtagcattttatgataatactacgatctggattaggatatttaatcattgtatactcacatggcaaaccctttcggttttctctcaattatattgctggatagctgtaacacttccccgaatggtaagagatcgaacccatccaattcaactggcatgatcaacaccgcggtgaattatcaaccagcgtggccagtgttgaactacaacgactcctactattattactgcatcagtttgaggaataaaaccgttataaatgtttactatccggcaggctagctacccagtgtccagaggagctcggctaacaggctaactgctcatatacatcaggtgtgtttaggcccacgccaaaattgaacattcgattgaaattgaaacgatgagacggaaaagttagaagtttatgtatgtagaaaagttttaatgtgatgaaaaaattaaaagtttgaagaaaaattttaaaactaaacttggccttgatcgaatttcttcgggcagctacagcaatgcctagtggtggcaactcttgtctttgacccccacagagcttggtcaagaaaggtgacagctagctaagggagatcaaaagggcaaaaaggagaagcgaagtgacaaggctaactaacccaaagggacatgagttacgcgcatgattgaaaaccagctagactggcaggctggcaagtgtatgttgccatgttgggttgcaaccccaatgtggcaaaaaaccagataacaagcatttatttcaagcctattacctagtagtaagcattatgggaagaggtagtagttactacctggtatttgtgctattgccggcaacaaccaaataaaatataagatggatggattttttcaggtggaccccagcttgtttaccactacactcatataagcattgtgagaagagttgcagcttactacctcctggtcatgggcccatcttatttactagttgggtaagatacattgcgcatgcccagggcaaagaaaatccgaacatcttttccccaaagctctctctggccacttcaaccttctttacgaggtgtaataaaacacgcaggacggctctccagtttgcccggcgttttgcatgcgcgcggatgagatgcactgccatcatcatggtccagacgtcctcgcaggctcgcacacgaacggcgatcatacatgctccgcaatggaacgagtagtagtatagagaagctctgaacttgtccaagtacggcgatcatacctctgtccatgtatcagatgttcagatattagctcctctcacactggcgttcacgagcagacggaaaatctagcgcccggccgtagaggggagaaacaccatggaggaggagacaagtgtaggtactgtgctaaagctgtgcagctagctctggagtacgtcttctgctacgactgcatggtggcgagacatacatgcagaaacatcagcacagcaatgatactttacgactgcatgcattgttgagagacagtacacagacggagatcagttgtacgctgcaacttgtgtcccgacaggaagctccaccataccacttcaagaagagtatttgcttcttcgtcaattatactccatatatgacgacgaaccaacgatggggacctactgatttcagctcttctcttcaagattctcactcgagtgttcttcaaaacagactactccgaacatgtagcagtacctttgtactgatctacctcacctcacagcttttctcgtaatagtagaacagatgctgcatgcgctgtgactttagcaaccaagattcttcatcctctcctcctatccccaaggcatcatctgcctgcagccacccaaattgctcgacacctctcttgcccctttccttcgagctgtgcaataatactgttcatccactgctccgttcaacataaagatacaataattccggtatcgtggaaaaggggaaaaaaaaatctctcgagtgccagctcgacgatgatgctcgccgtggtgggctggcccgcatgacagtggaagcaggacgggtgggcccccacggggtcaccgtcaccggaacgaggccttgggaggcccacctgggccggcctttgccggacagcatgcgcacgtgacggcacgggggaggcatgctccctctccaggaccagtcgccgcccgtcgcctcggccggcggccagccggccggccaccggctgctgcacacgtcgacatccccgtcactgtttcctcctgaacagtgggcccgaggaggagagcatctcctcggtttttaccgtcctctctttcctgtgtcactgtattggcggtgatgacgattctctgctgctggttggctacttcggctccaatggtagagcactgtagggctaagctttgactgtagcaggtgtaagtttttttttttcttttgccatgtgtgaagcctgtagctgtttggtggtatgtaaaagtcgccaatgtctgtcactcagctggcagggagggagggagtgaggggagattgtgcagggagaaaagagaggtggtattgcaatgggccaaggtcagtagccgatcgatcacactggcatctgctcaactcaccaagttggcgaaactgtttttcacagacgtgtcggccggggtaaggagcaaagaagggatctttcggtagccggatcgtgaaatgtcggccggacggcaggaagagtgacaaatggtgctagactgcattgtccacaacaaggccgttctgttcaccactggctcggcacataccggatcgtgtgcatcagtgcatatggagatccgttgctacagctaaaacatcatcaacagtgaggccattccgctcacagctactattacctggacctatatagcctgctggttttgctgctttaccaggcggtataggtgcctctacgtcatacgtacgtccagtccagctcggcttctctcaagagtgttctgtaaggccattgacaatgcatctatagatggcattcagcccaagctgtcacgtacgtaggagattcctctccatgttcgtgcaagtcatggcctcctgaagttcctcgtcccccacaaagacctgcataggaccactcagcgtgggggcaccatcgctcgtgcaaccgtgttgtgaagatcgtgtccatcgctggccctaaaacccagctttggtgcctcaacgagggacatggagtagctcgccgattccaacggccatcgcactggtcaagcaaggccagtgagtgaagggcttcgatttgcgccggagaagagagggcacaagcgcacgagacgcctagagagctcgtcagttgcgccttggagggtgctcgttcctccgtctacttgttgtcgcaaagctcgtcgttgtgccgggcgccgatcactggtggagaaaccatctttggtcggtcggccaaattctacaatagtcccggttctaataaaaaccggaactaaaaagcatctttagtcccgatttaaaagttgaggggtactttttgatctttagtctcggttggtgttaccaaccgcgactaaagatcatttttaatcccggttcaataagtcgtggggttcaagacagaccccaattatttttactcccggttggtataaacagccgggactaaaaatagtcccagttgtttatcccaaccgggagtaaagagtaccccgaaccgcgcgccaaatattatccgcgtgccaccaaaataattgtttatatcaaatatttttactcccggttggtataaacaaccgggactaaagatgatctttagtcccggttgtttataccaaccgggagtaaagagtaccccgaacgcgccaccaactcagatattatcgcgcactcctctcgatctcctcccctctcattactcctccatcccttcctctcccccttcatccccttcctctcccctttcccctcctgttcctccccttcccctctttgagaggcggccgggcgagtggttgcgacggccgggcgggagcagcggcgcccggcgggagcggcggcggccggccgtctgggtgcggcaggcgggcgggcgggcgcggcagccgggcgggcaggccgccgccgtgcgggctggcgcggcggccagccgggcgggcgggcgcggcgcccgggcgggctggcgcgacggccggccggccgagctcgcgcggaggccgcgaggacggtggccgggaggccggcggcgccatcctctctgttgccgaatttttttttttgaatttgtgattcattggatttgatctgtgatgtatgtgatctgatctgaatattggatcacatattggatctgatttgggagttgtgatgtatttattttaggatttgtgatatattttttgtttaagattttgtgatgtgatgtattatgatctgtgatgcatttcttttcaatatgtgatgtatttctttccagatctatgatgcactttgatttggggatgatttgggaatatgatcggggatatttagggagcaaatcgattttaaaaaaaaattaaccgggattgctcctaccatctttagtcccggttggtaacaccaaccggggctaaagatggatttttagtcctggttatttcacccgggactaaagatacccatctttagtcccggattcgtagtctcggttgtataaccgggactacaggggtccccaaccggaagtaaagcctctttctccaccagtggatccctactcaaccaccttccttcctaacttctccaccaacgttgggtggctgggaggagatggagttgagggaggagggaggggggagggggtgcgcgaggggtggcgctgccatcatggtccatgtaccctaagatcggcgaccgacatggccacatgaggttggaggggctggatccggaagttgcagatccttgacctccagtgcgtcggacgaggagcggcttgccttggcctcctctccgccgttgtggtgttgccttgatttatttattttaaagcggagtaagtatcaatatagtggtgccaattatatgaattataaaatgtgtactagctcgatactaaaataagttaatctagtattgaatgcttcacatcttagtattatgaatctgttcaaatttatagtattaggatgtgttatatccgatactaaattaacttattatggaacggaggaggtataaggtacttaacaaatattcagtagctagtgacatactcatgctactactatacacatattataggatgaggatattgtggcgatgtgtcatgcaattgacatagccaagccaagagggctgtgtggccagcgtgtcagcaacaacaacatcgctttttggctgagtaaaggccgtgtgttttcgcacaacttgcagctgttccctgttcccatcccacaaactcgtagggcctctgcccactcattgatcagtcagcgagtcagataacgacatgtcaaccctgtaattaattaccctaccctgccggccgtgatcaagtagatggatcaccggtttctcggttagtagtgtaccccgtactctccctatctcgtaaaaaacgaatcttagtactatgacgtgttgtatctgatactagtttgattttttatgggacggagagagtaactcgttttaatggattacgtaccctgcccgggtcatgtcaacaacatgctcaagaatacggtaaaaggacaatacagtataggcaagtcgatttcgcagcagtacatgcgagttaggagtatgattaacaatgacgcacacacaaagcaatgagtagtcaacgcatatcaaaattcgcgtgaagctgtagtatacgtactcccgagtgaaaaaactgaaaatggacagtgagtgcaaaatactactactacgtatcctaggaaccaactaatcatacacgaatatcacacgcaaacaaccaaatccagttgcattaaactgccaatctgaagtggggtaacaccagagatcgtcgactagtcgtaagctgaaaccgccagaacgaatacaggtaggtaaccaatcggttgtcccatcaatcaaagtatcaaacagcttcatctatcgccatgggtgcagcgcaacgccatggcccatggggcaatgggtgcagcgcaaagtggccacttgaccagttctcatgtgcctggaaactcgccaattcgtcaatcgccatgggtgccgctggtagaatagaaagagagagaactaggtcatgcacatccatcaggtggggtgcacgtacgtgctgggcacgtacgtgctgggctgcccaaacctgaaactgccaatgtgtttgttaggcctaccgtactagttgggtctatttcgttcttttttcttctcagcgagcggttaggcctatttctgtaggaataagttcactttaggcccctctatatttaatttgtcgccaagtttaaaattcatccatgaaccgcatgtgacatgtcccttagcttctaaaatcagtgcaaataagatataagacggtttaaaacagtggtttcgcttgacgtgttgtcttcattgtgttgacgtgacacttaaaaaccgtgggacccaaatagcactgaatgtttggtttaaaataaaaaaaattacagtgggatccacatgttttggggtctgccacgatgacctggcgacgggctacctgctcaatgagttcaccgacgactgccatgcaaatgtgtggatacatagatgaaaagttttagcgtttcacatcggatatacagacacatatttaaagcaataaacatagactaatattaaaacaaattacagattccgcctgtaaattgcgagacaaatttattaagattaattaatccgtcattagcaaatggttactgtagcatcacatgtcaaatcatagagcaattaggtttaaaagattcgtctcacaatttacacgtaatatatgtaattagttttttttttgtctatatttaatacttcttgcctatgtccaaacattcgatgagacatgatgaaaagtttttacgtagtaactaaacagagccctaccaaacactccacaaggggttcaactgtaatgtggagaagaagacaagatagcaccattgtgagcatagatgccgtgccatattgcgacactcgagccaatcgaggtcacccaaatagtgctatacatctttttttttttggtaaaacacactacaaatgtagttgaccataacacgcgcacgcttatccttatgaatgcatacatgcactctctactattatgagcacctccggaaggtgaccataactcatgcacattcatccctataaacacacacaacacacactttatcactatgggcaactccagaaaattaggccggcatatcttgagaatgatgaagtcaccacgaatgccacactcgcctaccaataaaagaataattataaatgcgtattacatgtcaaatctaagatttgaatctgggtgggttgttttcatcataataaatctagctagttactcacttcttagataattatatacgtctgcatatgtacatgagtaggctggtatatacaacaagagaccactactccgaaagtatcaaaaggactaagagtgaaaattaattctgattagttcccgcaaccccagttaccccacctctaaacttgcaacaccctttctaaaagttacgaacacagaacactctataaggggttcggttgtaacctgaagaagacgagattgcgagcatagatgccgttccgtgttgcggcactcgcgccagtcaaggttactcggatggtgctatgtatctatctagctatacaatggagtagaatggtacacacccatactttgtatcgtcattttcacgttcccgcaaccgaactgatatgatggaggacctcaagcatacgacggcaggttgcagcgttaacgctcaccatcatgcccatgacatgaggccaggatcgactacaccagaatcacatcatgtcattagcagcggagtcttcacgtgctacggtgctaggatgctgctatctactggagtctggagtaggatggtaatatctccgccctaaaataattttacttttagctattaagatttaaattgacaattaaaaaacaatgtgatcaattttaataataagaaaatagtacgagaaggttcgtaaaaagtaccgaatgaataaaacttctcggtactagttaaagggatagaagtgaacttattttaagataactagcacaatatcaatgcgttgtaacggatattataaaagaaaaaaggtaaaatttacaagtttttagcacagtaaatccatttggcatataatgcctacctggtgttaagatttaatgatgcaatacaatcaatgtattgataggcataaacttcgagacaactaaaagagctgatttaatggggtgtcaaacctatgggcccatacgtcaagaagggggtagtgctagcaaattcaatgccactaccattgctctcttttaaaatggtatggacttatactaccatcatcacattctattatgatgttggtttattttggtgtggtgggagtacacgcgaggcgtgctctctaaacgcactagaaattattaaagaaatagaaaaagtagcctccacgttcgctctcatggcctataaattcctacattaatcggagaaaaagaaaaagcagagtccatataaaaatacaatttagaaatagctgaaattcagaattaaaaaaaaaggaatattagattatgagactagagtccatatagaaatacaatttacaaatagttgaaattcggaattaaaaaataagaaatattagaagaggagtatagagtccatatagaaatacaattaggaaataactgaaattcgaaattaaaaataagaaatattagaagtagagtatagagtacatatagaaatacaattagaaaataactaaaattcggtattaaaaataagcaatattagaagtagagtatagagtccatatagaaatacaattaggaaataataaaaatatggaattaaaaataaggaatattagaagtagagtatagagttcatatataaatacaattaagaaaaaaaaatagaaattcggaattaaaaaataaggaatattggaagtagattatagagtccatataggatttttaaaactaattaaaatttgaaataaacataataaaattaaaagtagagtttagagtccgtataaaaatacaatttacaaataactaattaagaaaaacatgggaagaagagtttaaagtcaatataggaatacaatttagaagtaactgaaattcgaaatttaaaattaaagaatattgaaagatgagtttagagtccacgtagaaatacaattagaaataataaaaattcagaaataaaaataaataatataggaagaagagcatagagtctatatagaaatacaatttacataaaattcagaattaaataaaaaagaatattaaaagacgagtctagagtccatataggaatatatataatttacaaataaataaaatttgatattaaaaataattaataactaacacgtatataaaatacaatatgaatactacacattagtagtcttgtaaagttattgcaaaatttaaaattgtgttgtcattttaatatatttgaataatataatgagaaaacatatattctattatttgagaaagaatataatgatgctagccgcgtaatctgcgcggactatcatgctagttatattattaaaggaatagaaaaaggagcatccatgttcgctctcatggcctagaaattctctcattaatcggagaaaaagaaaaagtagagtacatatagaaatacaatttagaaatagctgaaattcgaaattaagaaataagaaatattagaagaggagactagtgtccatatagaaatacaatttagaaacaattgaaattcagaattaaaaaataagaaatattagaagaggagaccagattccatatagaaatataattaggaaataacagaaattcggaattaaaaataaggaatatcagaagtagagtatagagtccatatagaaatataattaagaaaaaaaatagaaattcagaattaaaaaataaggaatatcagaagtagagtatagagtccatgtagaaatttaaaactaactaaaattcacaataaacataataaaattaaaagtagagttttcagtccatataaaaatacaatttacaaataactaaaattcgaaattaaaaaaaacatgggaagaagagtttaaaggctgtgttctttgctccatgttcccaacccctctccctcatattccgcgcgcacgtttttcaaactaaacggtgtgtttttcaaactaaacgaaagttgtttaaaaaaaatcaaattaatccatttttttaaaaaaattgttaatacttaattaatcatgcgctaatggaccgttccattttccgtgcggggagatgggttctaaaccatgacatgcgaacacacccaaagtcaatataggaatacaatttagaagtaactgaaattcgaaattaaaaattaaagaatattgaaagatgagtttagagttcacatagaaatacaattagaaataataaaaattcagaaataaaaataaataatattgaaaaaagagcctagagtatatatagaaatacaatttacagaaaattcggaattaaaaaaagaaatattaaaagacgagtctagagtccatataggaatatatataatttacaaataactaaaatttgatattaaaaataactaataactaacacgtatataaaatacaatatgaatattacacatttgtaatttcgtaaagttattgcaaaatttaaaattatgatgtgtgtcggagatatgggcccgggggtatgtgaagtgaggggaatttaccttcccatcctgccgcgtggccctacagattggccctacccccgcacctcatgaatcacagacgcggccgagaggcctcggggtgccacgtcatgcccctcgggccctcgcgccgccttgccccgaggcccccgtccagctgccatgtggcggggacagcaagcggggaggggacccaggctgaaccgctatcaatgcgcgcggcgccccaactgcccctcgccgcattaaatgcggtaggggcagacatgaggtgccgcccgactgacgcacatcagtcaggagtgaccggtctgtgaccggcctatcgccggtcacgtctgactggacgggcggccgtgcccccacgtcgcctctgtccccggcggagtggaggtaggtatgacccgtcccatcggagcgtgattcggagctccctccacgagaaggacgtccaccacaagtcttcacccatttatgagggaatgacagggctgtcccccgtgtcaggcagggggcgacgatgggtcccgcttaaggacgagcggtggcttggcttccgggcgaaggcacgaattgtgatctggtcaaggtagggtgggtccccaccctgtagaagagtaggtagaggcggtgcatgtggtttccccttgagctataaaaggaggaccttacccaccgagaaagacgacgactctcaggaagcctgagctctaggagaagagaagcgagaacgctctccggagtttaggaacccttgtaactctcaaccttaaatcccacacacagaagtagggtattacgctccatcgcggcccgaacctgtataattctcttgcccatacgcgactagcaagacttagggcggatacgcgatctctagaggcgagcccttttccctagccgaactcacaaaaggggatctcacgatctcccgatagagaggattactcctcgacaatgtcattttaatatatttgaataatataatgagaaaacatatatgctattatatgagagaaaatataatgatgctagccgcgcaatctgcacgggccatcatgctagttttaataataagaaaatagtacgagaaggttagtaaaaagtactgaatggataaaacttctcgatttacatagcaaatactagttaaagggatataagtgaacttattttaagataactagcacaatatcaatgcgttgtaatggatattataaaagaaaaaaggtaaaatttacaagtttttagcacaataaatccatttggcatataatgcctacctggtgttaagatttaatgacacaatacgatcaatgtattgataggcataaacttcgagtcaactaaaagagcttatttaaggggtgtcaaacctatgaacccatacgtcacgaagggggtagtgctggcaaattcaatgcccctaccattgctctcttttaaaatggtatagacttatactatcatcatcacattctagtatgatgttggtttattttggtgtggtgtcgcgtgttctctaaacgcactgtgtcgtgcttcatccatcttaaaataatcttatcttttacctatttcacacgtaccaataaaaatctctaatttattaaatgctaatctcttcgtctcaaagtgaacagaagaatatactagtaatacaattatttctcttctaatccgctctcagtagatttaccccgtacttacagccctctacaatcctccctaaacacagagtgctatagcactgtgcagtgcagtgcctcattcgtctcaaaataatcctatcttttacctatttcacgtaccaataaaaatatctaatttattaaatattaatatctccatctcaaaataaacagaaaaatatactagtaatacaattactacttatgttccaatccgctctcagtcgacttaccccgcacttggcagtctggcctctaccatccttgcgccgtcgcgcgctcgtgccggggcttggctgcgagcgaataaaaagaaaagaaaacgtcaaggcctcagacgccagagcgctacaaaatggcccacgccgccgcggccacgggcgcactggcaccgctgcatccactgctccgctgcacgagccgtcatctctgcgcctcggcttcccctcgcgccggcctctgcctccaccaccaccgccgccgccgccgcagcagccggaggacgaaactcgccgtgcgcgcgatggcaccgacgttgtcctcgtcgtcgacggcggcggcagctcccccggggctgaaggagggcatcgcggggctctacgacgagtcgtccggcgtgtgggagagcatctggggcgagcacatgcaccacggcttctacgacgccggcgaggccgcctccatgtccgaccaccgccgcgcccagatccgcatgatcgaggaatccctcgccttcgccgccgtccccggtacgtattgcccgccccactccgcccccccggaatctacgcttgcctggctgcgcggctgagcccatccagcttttctgtttggctgcaagccgctggccatagagaatcccggccatttttctgctgcttaacagttgtttctgcctacctaacccctgctcgcctcacggctccagcacgtacggcaaaatcatgagatattcagggggttttctttttctttttctttttggagacgataaactcaccatcttgattggtgtgggtttaattttgtacagtaccactattttgttccattcattcattcacttggtactcgtactacgaaaggtgtggacctgtgacagttttggcacgcactattcccaacaggggttttgcagtcctatctcacacggtagaccgtttgagcatttagggcccttttaaatcatagaaataaaaaaacaaaggaataagaaaagcacaggattctaacaggaatacaattgtaaaacagaggattgcaaaacacaggaaaaatacaggaatgaccgtttgattggaccacgagaaaaatgtaggaatcatatgagagagatagactcaggaaatgttccaagaggttagacttcttgctaactttcctccaaaatgtgcataggattacccattccataggaattttaaaggattgtatatgattcaatcctttgtttcaaagaccttcatatgatttttttttccataggattgaaatcctctaaaatttctacatttttcctacaaatcaaaggggcccttaagttcgttagcttttctgtttgaaacatgttttgcacggattatttagttgattaacacgataaatcaatattttaagaaataaactttacacataatttagagtaagtaatctaacaatgcagtagaagtttttttttttttgagaaatcgtattttaataagagtggagcaaaaacctttggcaaaaatttggagaaaagaagctcaaaaaacaaaatccgtggcgaaccggcgattgtggtattagtactgcaaagaatacgaaaaagaccaaaattgttgcctgaattcagccgtagtttacccttggagtacgtacatggttcaattaatttgctctagctgataattgtgcttgatgcctgcagatgatgcggagaagaaacccaaaagtgtagttgatgttggctgtggcattggtggtagctcaagatacttggcgaacaaatacggagcgcaatgctacggcatcacgttgagtccggtgcaggctgaaagaggaaatgccctcgcggcagagcaagggttatcagacaaggtgcgtattactactgtttattctgttctaaaaaaaattctactgtttattcgtatcgggatttaatctcgctgtagctagtcatagttacatttgacaatatcagagggtttaagctctgattactcactgctggtgtgacgacaatctgtttaagcaggtctcctttcaagttggtgatgcattggagcagccttttcctgatgggcagtttgatcttgtctggtccatggagagtggcgagcacatgccagacaaacggcaggtaagatactcctcttttttatccttacagaaaaaaagaaaatgggaaaatgtaatccctccgtttcaggttataagactttctagcattgccacgttcatatagatgttaatgaatctaggcacacatatatgtttagattcattaacatatatatgaatatgggtaatactagaaagttttataatatgaaacggaagaaatatcttggatcggagaacgtttcaaatctagccatcaggttacggtggcatgggttaccatgcatcggttggaatcttggttgagcaatcgcatctgtcgattttaatttgccgggttgcgaaaatgtagaaaaacgagaggatattaatgaaacaattctgctatttattaaaatcagatgtcaatcaactcatcttgagaggagtctgtattggatgttactgaatagtttttggatcttttcactctctttttttagctaagagttcttacctgagtcttttacagtttgtaagcgagctggcacgcgtcgcagctcctggggcgagaataatcattgtgacctggtgccataggaacctcgagccatccgaagagtccctgaaacctgatgagctgaatctcctgaaaaggatatgcgatgcatattatctcccagactggtgctctccttctgattatgtcaaaattgccgagtcactgtctcttgaggtaaaaaaacttttcatgctctgaactcgtaagtgaatttaagttacaacttgatatggtttgcacatcaacttgcgtaccatgccgatttgcattctcgcaagagattcttgcatgtgtgtgacatgtgaaatgtgccaggatataaggacagctgattggtcagagaacgtcgccccattctggcctgcggttataaaatcagcattgacatggaaaggtttaacttctctgctaagaagtggtatgatcttgccatcttcctttcctccacttatgattatcggcaaacagatgttggacaaaactgaactaatttgtgttggcttcgtcttaatttgaagggtggaagacgataagaggtgcaatggtgatgcctctgatgatcgaaggatacaagaaagggctcatcaaattcaccatcatcacctgtcgcaagcccgaaacaacgcagtagtaccctagtagtgaaattacgctcctgctatcttctccatcacgaataatgcaaattctgacgagttagcacctactgatggcgatttgttgatttggggaacagccagtgcactgttaccacgtcattgattttgtactcgtcagacttaaaaaaaaaatatccatgaatgtgcactccaaatacgtcaagaaattcttagatcttcagaccaactcgtcagctagaggtggctaaaaagctcatttagctccctcggtgcaagattgctttgattgacctagttttcttcttaaaactaaaactattttactttggatggaagttagtttcactctgtctgggctcggctcattagctcgttaagaaaaacagtttcaaatgataaaataacataataaatcaatttcgaagaaaaatggagtagataaaaagcacagccgggctcaaccgagggcttatttagattgaaggattttcatgggaattttggaggactcaaatccttgataaaatttctacaagcccctttggaacataacaggatcgctataaatcctatgcctcccaatttcataggaaaataaacatgagctcaaactcatgtttttatttccctttgagaaatctaatgcactctctccctatctctctccctttgagaagtctaatgcactcgctccctatctctatagtttctctcctttgaaatttctgtgtttacttgctactaatcatccaaaggcaactactctatagtattcatgtattttaaatttctgtaggattttatagagcgtggcatcttatttctatgttttttttatcactgtgtttttaaaattttgcgctccaaaggcgcactagcagtgcagcagcgtcactatgtcagctcgacgccgaaccgccatccttctccgatggcgcggcgcgctcaccacgccacccgcgccgcacggtgaaccaaagctggcacggcacgggcaggcaccagcacagtcgggcaaccgacggtctgccgcgcgccgcgtggtgctccggtcacggagacgtcggcaatcggcgtccatcgatgttgccgtctcactctcgtcgtccttcaggatgacccacttgcccgctccataattcacaaaaatagccaagcaaaagaacggctccatctggtacgaaaatgacagggccctggttaagaaatcaacgacgttgcgaagaaagcttggtctctgacgagagaatggcaggaaacgataaggtagtcaggtagagctagaactgtcagtttcacacaggatcattcactttctctccagcagctcaacaaaggctcgccaaatcacatcaacaagaatgcttattgtataatcatccctcgtgttcaccaataaatctgctgcggcttattggtattgtatgactaagaacagggttcgtggctatagctgacatccgtaaatttgtaatccatcttggaattaacaaaaaggtagcacacaatttgagcccaatctctgcttaatttgtcggcaggacgtccaacttttatcagttcttcacggtggttacatgcctaagaagcatctggatcacttcaggggagacatttgcagcctgctccttcagttgcgcaattttcgtgtcagtttcttgctcaagccgttttacgtttgcaccagaatcaccgctactctggaaagaaacaggaaggttagcggcaatagctcttctaattccacgaactatacaagattgaaagatgcatacctccgcaaccttcctctggaactcagcttccatctgagcacggtactcagctatttctctctcagcctcctcttttgcctgacgaataggaaaggtattcagtttcaaacccaagtcagatctctagatgttgaataaaaaatgagtaggagtaacatgtttgtattgcgtgcttagaagcaaaagatagaacatggtttctgtaaacgatcatacaaggccatcgcattctacaaaagctgtcaaagggcacaattcagggtaacataccactttttttatacatttccattcaggtgttatttccaaaatatatgtgatatattcgatgtccaactatatgaacaaaataccatgataattacatgctaaaaagatatcaaaggaatcagacaggtactttaccttagttaaggtacagaagaatagtaacaagaaagcatgtttttcactcaattttcgaggaactaacagaaaacatgaggccatctctaattcccactgttgaacatgttttaaattccagaaagcatgttttcattctgctgaacatggaattttcccactgttgatttgcttaatgttggtacaatggaacttattcaacaaacaggatgattcaaaattaccctataaagacatcaacaaagaaatatacgagcaaaatcttgttgtaggtatatcgaagcaatcattgcacatatttcgtacaacataagcaattcccccccatcaatttccgcgttattcttaatgaatatttgtggaacaattaccgctcctagcagcattaacaatctgttgagcttcttgctctgcagccaataattgctgaattccaccttggcgtctgttagcatccatcttccttctgctacatggtgtgaggaactattttattattagacaaaataacacatagtgaaagccgagtggaatataacaagtcctaaatgaacagaacacaaatgaatgtgattgcataacatatgccagaattcgagcattcacaagatacattttaagaggtataaataaaaaatggaagatgttatcttctaataaaagccactgacttttagttacaataacaggtgctaatttggcaccggataacagttacaataacgaggataacaacaaaacaaaaggactttctctcccatacctaatatccctacttgtgctactttgcattcagaagcacaataaagaaaatagcagtagtgggcctcctattgtttttactgggagtaagagggttctttccaagctaccggcttgcctgtaattcagttatgcttgtttacccatgtacaggtttgctgaatgaagaggtcacggaattagttaaccatatcagaggattttaaaagtgtgcgtgcacaaaataacatctgctctctatcccaatctacgatcacagaatataatcatgcgatattatatttcttcttgcacaaaatcaaaccacagagtggaccaagagcttttatgatgatacgatcagccgaaaagagtcagaatactaaaactaaacaagcatacgtctatagcggcgagcagaaggcaataatcccccaagattcatccctgatccggcccacaacgatcccattgccagttttcaccacctccccacttctccacaatagtgtttgagatgcgcaagcaaatgtgagtggaaataatcaggaaaaaaaaacctactagagaggcaaagcctccagattcgcttcaatcaaccgaagattggatcgagcgagggacctggtatgcgcaggcgagaggggatcatacctgcgcgcacgacgattctcgaaggggtgttggggttgcaggttgcagccttgcaggagccaggagcggatctgtggctagcgatagaggagagaagtctgagaagccgtgaaggcacagattgacaacgaaatcgggttatgattggacacataaaattgggccgtaagcggcaaggcccaacatgttcaacccaaactgtaatggaaaaagtacaccgaaggtccctcaacttgtcatggaggtacaaaatcatccttgaaccacaaaaccggatacaacgcgtccctcaacctataaaaccagtgcaaatccctcggcggtttcgaacccggttttgtccgacgtggcagctgactcagcgtgggacccacatgggccccacgcgtcagcctcttcttccccacccctccatctctcttcctctctctctccttccctctccacaggcggcaatcggcaggctgggcgcggcaggccggcgcagcgggctcggcaggctggtgcgacgggccgcggccgacggttggcaggggaggggctgggcgtggcaggccggctggtggggaggaggtcggcgaagcgagacggcagaggaggaggcccacgggtggtaggagcggcaggtgtgctcgaacaggtcctgtgccgcctgcgcgcggtcgtccccgcggcacatgacagagagaagggagttgagggcgacggcgtccagctccacgccgtacttccccatgacattgaaggcctcgacggctttcctgtggttgccgctggcgcattaggaggagaagatggaggcgaaggtggcgacggtgacgaggccgctgccctccttgttcatggtgcggacggcggacggcgtcccacatgggctactccatgccggccttgccgaggatgtcgacgaggaggttccaggcgtagccggtgtgattcaccgaccgccccgaccagacgaagaagcggacggcggacttgggacgggagtagcagacgcgggacctgagcacctgctccgcgacctccgcttccgcatcccccgactggacccggcgaggatctccaggaacgcctccgcgcgcggtgaatcctcctcgccgtccagccgccccttctccgtcgccgcgctcatcggcgacaagcgaagggattaggatttaggaacaatgaaattgcttttgggattgaactgcttccgattctctgaatctcccctcaaacagcattgactggaaggttgttggtgatgagtttccgcggtgtccgtttgtcggtgaggcggagagcgaggtgaggcggcgccgccctcaccgacgacatggagattgcgtttccggagagcgagacgagtgcgggcggtggccgacgagtggcgttgtcccgctgcagtgacaaggacaatggtggctagagagagagagatggatgcgatggatgtggtgacggcgacgacgacgacatgcggatggatgtggcgctccgtgggctggtgatgagccgagcacggtagcgtggtcggcatccggtgacgcccgagctcggtgacgccgccgccgccgccggtggcagctcctccctcgccagccgccacccgcgcccatcttctctctgccaattgcccgtggagagaggacagagagagaaagaggtgaagaggagaggggaagaagatgcagacatgtgggacccacgtgggtcccacgctgagtcaactgccacggcagataaaatcgaagtcaaaaccgtcgagagacttagtttgcactggtttttgtaagttgagggacacgttgtatctggttttgtggttaaggacgattttgtaactcgatgacaagttgagggaccttcggtgtactttttccaattgcaatttagcagggcaataggccctctggagtctggacgcaaacgtgcaaactgttgctagttccatttggatttacaaaacacggtttcattcttgcatgaaaatactacctccattttttaatagatgacgccgttgattttttcttacatgtttgaccattcgttttattcaaaaaatttacgtaattataatttattttgttatgagttgttttatcacttatagtattttaagtgtgatttatatcttatacatttgcataaattttttgaataagacgaatggtcaaacacgtgagaaaaaatcaacggcgtcatctattaaaaaacggagggagtatatatttttcttgaattctaaatgggccttaaagaaaactgtattttttttctctactggttgttagtgccacttgtaatcttgtcataggggtaggactaaatccatcaggattgaattatggcattcttttaaatactagtaatatgctcgtgctaaacgctacgattttattctatctgtcttaaataatttttagaatttcatgttagcaaaaaaatatttttacatgatctatgcatttgaactttaattcaattcatatcatacataaaatatattttatgtaaagtgcagtactatgatattgcgtgggcacaataaaactttacaagatgaggcccacatgtaagtcataggagaaaaactaaaaagcgtagggcccactcgtcagccctattctccctctctgtcttttcccccaaaaacagcagagcaagcggaggcggcggcgatggtgatggtgattgcagtggtgcgggctgtatgctgtggatggcgatggcgatggcgatggcgatggcggtggtgtgggctgtctacggtgcattatccatttaagttgtatggatgaaccatgataaaaaaaataatccagaacaattttgtaagcatatgtatcccttaatataatacagaccataattacaatctcaaatgacagcctggtgcaaactgacacatctagtgtgagatagtatgtagaagataatcacacgacattccatataaaaggtgatggtgtgctgtacaaaacaagaggacgatggtgagtaacattcgatgagcaatttactatattcaatatttttttgaattaatttagatcatgcgaacctacctttgctcactagtcaagaacgtctttatacacgatatttctagtgctcttccctgttgaatcaatttctttctttggctttgccaaaatccttgttgttagccttgacacaccccttgacaatgcgacatatagctgaccatgtgaaaacacgggctctagaagatagatcccaacatttgggatggtttgtccttgtgatttgttaatggtcattgcgaaactgagacgtattgggaattgcttcctcttgaatttgaaaggtagagatatatcgtcggagcaagacaaagggattcgtgggatgaacacccttttgctggcatgttgtccaccaacaatctcagcatcaattgcattatcttgaaaagctctaaccattagtctagtaccattacacaatccattatttggatcaaggttgcgaagaagaatcacgggataattgatttttactattagctcgtgtggtggcagaccatttggagtaatagagttaaggtagtccagaggataactgttgtgagggtcatcatcaacagagtcaaagctgtgataaaccttggcctgccctggaaatctgttaatcatattcgcattcagcttgtccacgtaatcatttttagtggatagaatagcacgtgtgctcatataagatgcagagcttgcattcttttcatcatcaagtgagtgaaacacatgattaatcaattcgtgtactgaatcctcgctattcccgtaagcaatcacaatttcatcaggtaagtgaacgtaatcatctctgatagtgttttcagtgccatttccaattctaaggagatatttcgaaaaccatggatcagattgagccctcatgttacgcgacaatctgatcttcctaatattttcccataaatatgatctctgcaatgttgcatcagttatctgggcccttatcccacgtgtaaccacgggaagtaactgtctgaaatcatcgccaaaaacaataacctttcctccaaatggcaatgaacaacccataatgtcttgaagagacctatcaagtgtctctacggcttgacgcttcgtcattgtagcttcatcccaaataattaaggacgccatgtgaagcaattccgcggtgccactttgcttcatgaagttgcacatgctattgtgagaaatcttaatagggattttgaatctcgagtgcgcggtacgtcctccaggcaaaatcgacgctgctgtacgagacgtcgcagttgcaatggctattaatccctcggaccacactctagcaagaagcgccttgtacagaaatgttttgccagtgccacctgggccgtcgataaaaaatacctggctcttcttattagttacatgatcaatgatctcattaaatcctgcacgctgctcatcattaagggatgtgtatatgtctaaatggtcttggtccactggcacgttaagttcgtctataatctcttgtcattacgtcgttgcaacattcacctgattagtgaaaacaaatatatgcatcatgaaactattggtgggtggtgcaaatgtaaactaataagaaaaagacgtgatagtataagaaaaaaaatacctatatcaatgacctcgggaagaccatactccgtgatatccttccccatggaatgaagcaaatcacgtatgtctcgtagcaccatctgctctactgctgcagggttagtgttccctcggctgtaatcttcagacattgcagccttgtgattgtcccatagtgcacggatatcagtgacttcgcaaaataccagtatggttgcaaataaccgacgcagagcagatggcatttggaaagtgaatgcctcgttcaaacaatcgtcatgtgacttatccgtctccacaagccctctcttctcgcatgcctctctaaaggtagagtacgttgtacctgacactgtcctcaaatcttcaaatgaggttgcacctcgcacgtggttgagaagcactctcaagtagtatctctccccctctgcagggtgagcgtacacaacccgtctaacttggcctctctttgttttccttttttgccacacattctgtccggttatccaacggtagtgttcagggaactccttttatagcagtttccttgcttccgggtctacttgattgattttgaaatactccgtaagagttgtcctggtagaagatggaagattaacaacatcctcaagattaccaccctcattatacgtgacatactgcatgttaggaatatgaagttggagctgcagaacagctggatagataccgaacagtggaaaaccaagcatcctatgtatagcctctggtggtgtcacgtatctagcatttctgtactgttgtatctcatttatttccccagatggatcaaccgagaaagatgcacagtcgtgtcctttatacacatacttatagaggtacttcacagatttgatgcttgcacaagcctcaacattgatgtgacaattataccgcataagcagtcctggattatatgggaccacccacctattgtctaacactgcacctctaatcttgacacgccatccatcatctcttctcctgtacaaagggtacgagtccttcccttgttgtgttgcttgattgaactatcgaggaaagttgaagcgatactctccatccaccatacaagcacaattcctattcagtgtgccacatggtccatgcagcatatgcttgatgacaagacgatgtagctcagggtatttggccttgtctggtatctccgtgcaaatcactttatcgtactcatctggggttgtcaatttactgcttgacttcatgatcaacaggatgtgttcatgtggtagtccccttttctgaaactcagtgacgtgcgcgtaagcctgaacctccccaaaatattttttcttcacaataagatccaacacatctcgcagcttagccctgaaaactcttgcgacaaggtctggtcgatcttgaggttgctggccgggttcaagatgttctgttatctcatcccagtatgggttgcacgtcattgtgatgaagtaatctggcctcccaaaacattggacaagagccatcgcattgagaaaccttcgttgcatgtcgcgatcacctcccggaaaagatcgaggtagcacaatcctcttaccaactgccgaaccgcttgtctctccagaagaaagcacgtcaaccacgccctgcaattattaaataacaccatgatcaaataactggtatgttgaatcacagatgggagacaatatcaatagttgtagaaatatgttataccatttacctggtatagctcagcccgaatctttttttggttctcaggttttgagtaccaatcgagtctcatatactcgattttgatgtacatgtcaacggctcattgttggaaaagtcatcctccgaacaaatgatgtttagaagtccccttctaacctgcagcctgaagcaatagtactccctcgctgtgacaaacttgtcctttttccctttgccagatttactactatcgtcattatcatcttcattgtctagataattgtcaacaacctcattctttgcgtccaaacttacatattaatatacataaacaatgcataaggacataaagtttagaaattattcgacaaaagccatgagtaaacgtacccggaagatcattaaaagtgctttcttcgttggtatgtacatcaccaaaagttgatgcttcacatgtttcatccatttccacatcacacggaatctggttgggatcgtcgtacggcatttttaggttccacccagtctccccattagggttaaataaaggatacgccaaaggatcataacaaccatggtatgctttgatataacaaggcttatcaccttttgcatgtaccaagacatgtctatcaaaagttttcatcggatcatccccctctaaccagatagtggcaacctgcgaggcggtgggtgcattatatcttcgttggtcaggtgttacattcgtgttgagctcaatcatgtagtcatctagattggacatggatccaactctactgaaggtctgcacatatgggttctgcaccaaaatacgtaaaatgacccgaacaaggttgatatcaaggtcaggagacctgcgaaccctatgggccagtgcattagcatcttctgtatcataaaagtagagctgcatatggcacggcccttgagaacctggaaccaaattatccaagcgatggtacaacgcaccgtgcacacgaaatgtatacacaccagttcctgctgcagtgctgactcgttggtcaagggtcactccaaggctcgtaaatgagaaatgggagttgaaataccgtatgtgctttctgaaatactttgcatcattatgcacttggctggtaaacaaccgtattaattcatcaggcaccgttggaatcttaacatttatctttccctccctacaacaaaacccaggagactcaaattgaaaccttatcgcctgacagtgtttgcaatctggcactttttttaaaacatggtgtgtctttggtagcttatggtacacacgatcgtgtgggtcatcagtactaatcccaatcacaccagtaacatcaacacgatatgactcgtatccatcatcctccagaacttgactgacaccttcaaaatcattgtccacacattttgcgtcctcaacccccctatagatgatgcatgagacgatatatttttaataatggacaagataaattaactgtttaggtgattttttgagaactcaacatcgacgacaccatctacaattgcaggctcgaataatgcactatcgaattcgacgtagttggtttgtggaatggcatgatgaacaattggtttctgtatagtttgactttgtgtaactccatctggttacaacgtatatgtttggattaatattggttaacactataaatagagagcaatgcacatacttgtatctaatgttctcacctatgactaaaccggctcctgtctgttcaaggtttgaagcttttcttacattgaatcgaggtttgtagacatcatttctgtgtaaccaatcatttggatcatctggatcatgattctccttgtcggccacctgcgcatcatttagaatggtggaacatactgttccataaagcgatccttcattaatggtggagaaagcaccttagatatcaaaacaatatcagaatattggattaaagacggagaaattagcggaaggcattaatcttaccaatagcaggggtgcttgatgtagcactccagccgtcaacattgttcaacttagccttctttcgtgcacgccattcacgctgatatttcgtcttctgttccctcctcttgtctatactcgacatctcattttcactctttttgtctatgctcaacattttagaatgattgaccttttgactttcagtcacttgcgagtggcaagaggtcggtgtatgaattgttttgtatgatgttacttcatctggaacattgtttgactctgccttcctctttgcgcttttctcgtgccattcacattgctttctgctcttctctctcttttctttagctaacaactgagcatgcgtcaaattctgcatgacagtggctgatgctcctccaccatcaacagaattagactgagccttcctctttgctcgccattcacgcagttttctattcttttcatctttcttctctttcactaacaattcagtctgtgtcaaattttgcattatagcatcatttgtcacaccttcttcaccaaattttgactcggccttctgtgcgctccttgcacgccattcacatagctttatgttcttttcttctttcttttgtttgtctaacatattggtttgtgacacttgattaggtgtggtaaacacaaaaggattgacacatgtctcatactcagccttcttttcatgttgatttgtgtgctttctagcaatttctctccttttatgttcattcgttgtaaaaggtgtgtttggagctgttgtagttttattgcaaaatggaaaaaaacaaaagatgtggttcatatatgtatacaaagagcagtcaaaaagtagaaaatattatacatgctacaacacctggagaaacattagttacatctctgaaggcaatacgccccccattggctgaagcatttggatccatacctagctgataaaatataaacaaacctgagattcatccaattcataattgtggtttcatactgtatatagaaatgttatacatcaattgaatgtatcactacaaataacaaagcataatataacctttatacttataacaatacaagcccaaccagatccatttcactgtcaactttaaagttgggactcggttgcaaataaaaagaagaagttatacagtatacaaatcagttatcaagtcaatgattagcggtagagcaataccgatacagtatgaaaaaaagtggctcacctgaacaggataatcaaaatgttaacaatcttatttgcaaaaggagttaatctgaataacttatattttatcatgaaaggtaaaaactgtgatatattaatgttgtaaacataaggactgatgggccatgggtgtagatatacagaaattctcatcgaggattcccaatttctagcacaatttacattgaatatattgagcataaatgatgtttttacaaaagatcgacggcagggatacttacgggaaagaggagacatattagggatggggtaggggtggggaaggggtcttgtacctttcagcagtggtagctcttgaggcggcagcggcgtcgcgttgtcggctgtggatggcggcaccctcggcctccactgcctctgcacggaagctcaaatcttaaagcttgggagcttttagagtcctagattcagatccatggaaggatttacaacttggttgcacgagtttcatcagttgttggcttgagaattaacacatattcagatggcacgtctttgtattgtgtgattagccaaatcccatactccataacctcaatggataagtttggcttacattgctgatcagataaagggaaaagaatagcatttgtagaactaaatcccaacagtttacacccgatcactaaaagtagagaaggaaattttagctatggatcgaatctgtcaatttatttcagtaatgtttctatttgaggttgcttaacagagtaagaaaatgatattcttttgtgaaagaatctatttaattctcatatgaaatccatcgcatacacacaccatgtcacatttaaaattattatatcataacacaaaatcaggaaagaatctgttagaggtaaaaactcaaccttatcgcgggcggcggcagcggtgaggtgcatgagatcgtgggcggtgacgattggatgccaagtccggagtatatgatatggaaccctataaaaacatgaaagggttcattagtagcttcatccaaccagttctatttgaatttaaaacaaacaagtgtactatgcactttgcaactcgcctatagtgttcattgatctaatatctgccaatattgctctaattttggaggtgtagaaactgttacctgcattaactttgaatgattcacaaaggagagcattttctcacatggctaaaaatgatgtataggaacaggttgacttgtatttaatccaaaaggggagaatcagtaaaaataaaccattcaggcaaatagacagaactgtctttttctttttctgaaagtgacagaaccaagttgggaaacacaattctactctgattcgagtcaagcttaatgaaagacctgatcatgcagtggtttgtcaagggttaaacaaccaaagctaaaaatcagcacacaaatttcctttaccaaaagtacatatgaacgtcaagcaccaggtagagctatcaatcatgtgcatggcaaaatttggatgtctgacgataataatatgcttgggaaaggatcagcatgcccaatcatacaaatggtccagcaagtcatataagttattttataagattacaagtttctatagattatatgatttattatcacgagtaaagcagcacaaattgttcttatggaatttataagctgacatgtcatcctattttttagtatttgtctgacagatagtttcaatacattagaatgcataccatcgactcttcactatccagtccacaaaattccaaaattctaaatattgttctttaaaaaaatgatgttgatcaaaaaaatgggggagggaagggagggatctggcagccagggacggcaaggtcggtggcgacggcggtggggagggagctggtggaggacggcgtgggcaacggggaggatcgatggcggcggtagtgggggagggatctggtggaagggcggtgaaagacgtgcgggcgcgcggaagggcgaagagacacggatcattatagtgctggctagtttaaccacatataagcgtgcaatgttaggaaataatgttcaatcagtatagtgttggctagttgtagttaaataaaaaagtttacatatggaacgaatctgccatttttagtaaagcttccatttttctatttttcagtccatactttcacccaaattcacttttattttcctattttgaaaaaaattacctcattgacatctttatacatacagaacatttcaagaaatctacctctcatctcagtctttataaaatatatatctcccaatagcaattatgtactgagaaccacataacaagaggctacttcggtttatttttagtttcattaaaaatgatggtgagcatgggaaccgctatctatcatgtgttcaacataaatgtaccaagtttcaccctcgatgattcaaaatgcaatagataatacagtgatcccaacctgaagtcgaagtgtctggctgctggtggatagcctctaggaatgcgagttgcggtgtggatgtggacgatgaacggaggtcgaggcttgacagtcggtggcaatccagaggagatcgggcggagaagtcaaggatgatggcggtgatgtggtcctcgaagtggaggcgcggagttgatcggcgatgcgggtggcggcgccggtcgaccgcggatgagatcggcgaggccttcgggggcgcaggtttgtggcggcatggagatcgggagaagagcagtagtgcagatcggcagcgactgcggaggagatcagcgaggcaggcgtcgctggatttggtggcgttgattttggcggcggcggcggcggagaagtgagaccgtgagagcgaggggcgcgatcaggggagggagaggagcgacgggggatggggaggagatcgcgataggggtgggcgcgggtgggcggttgtccggagagtgggagcacggtgggtatcgatcgttggatctaacgaggaaagatcctgaccgttccatgaaggatgaagtatgtagtatgtaggactgttgttggtggattatagggtagactatagtattacctattggcagatgtcttttaatacaatgatataaaagagtttattattttctttatttttttgacgtgttttaaagggcacattcgtaggtcccatttgacatagctccacatctagattcaaactgaatatgaagttcttaagttcaattatagtgatttagaattttatatttcatctaaaataggaacacaattacattcaagtgtcgttaatgtaatgagtaaagttcatcaccggtccctaaacttgtaccgctgtgtcatcccggtccctaaactcgcaaatcgaccgttcaggtcctcaaacttgttcgactgtgtcatcccgatccctaaacatgcagatcactcgtttaggtcttccaacttgttcagttgtgtcaccccggtccctaaacaggacggtctaaaaactttatatcaaaaatttcatgtgaactctaatgaagacaaactttatattaaaattgtagccctcgacgcgacctacgactttgtagttgaaaagtttttgaattaaaactgtttagggtcccaaaatattgttgcatgtttatagattttgaaattttaattttaaaattacattttgggacaaaaaatgacttgcaataaaaaaaattcaactacaaagttgtagatcgcgtcaagagctacaagtttgatataaagtttttctccattagagttcacatgaaaaagttatgaattatttttaaatataaagtctttagtccgtcctatttgactcagatgatattcaaatctaagtttagagaccggggtgacacaacttaacaagttggatgacctaaatgagtgatctgcaagtttaagggccgggatgacacactcgaacaagtttgaggacttgaacggtcgatttgcgagtttaggaatcgggatgacacaacggtacaagtttagacggtgatggactttactctaatgtaattgtagatctagatatatggagttagtatatgcgtatttcatgtactaaaaaaatgagttcaattatccctctctcctgttccataatggccggcgtggcgttttcttgtagtgctcgaagtgtactcatatgtttttttttccgttgatcaatgattggtatttttaacacacaagaacttgccaacaaaaagaaaacttgcgagccacatcgttccaaaatagttgtaattaaatgactaatcaaagaacgtcataccgtcgatttctttttagctgttcttgtttgaattcagctatgtactgcgagaaaacacacacacacacaccttgcaacatagtgtcccatgtggcaaacctgaccggctcattggtcacggccacggactctccaccaagtcatcccgcacctcgtcctcggtcagatctgccgttcccgccgggccgcgcagcctcggcctccacgaagctcctcacgtctccacccttgtacaactagtacaacctgggtccactccgacggcggcctcgcccactttaaaccaccccctccgcctcgctccccttcctcccaccagccaccactcgcaaagctcgacctcgctcgccatggccgccgcgctcctctcgctcctcatcctggtgccgcccatcgggctcctcgcggcgctagcgttcctggcgcggcctagggcggcgcggatcccgctcaagggccggcacgtgctcatcaccggggggtccagcggcatcgggctcgccatggccacggcggcggcgagggagggggcgcgggtgtccatcctggcccggaacgccgcaaggctggaggaggcgcgcggcgccatccgggccgccacggggcgggacgtcggggtccacgccgccgacgtgcgggacgccgacgccgtggcgcgcgcgctcgccgaggcgggccccgtcgacgtcctcgtctgcaaccacggcgtgttcgtcccgcaggagctggagaagcaggagatggaggaggtcaagtggatggtggacatcaacctcatgggcaccttccacctcgtcaaggcggcgctccccgccatgaaggaacgcacaaaggagacgcgcctcccggcgtccatcgccatcatgtcctcacaggccggccaggtacaccgtacaagcaaattcaggctgttatgctcatgtcgcagcccaggtgttcgatgtaatgcctcatggtggggagatgaggttttgctgacatgattgctcttgctgtaggttggagtttatgggtacaccgcttactcagcgagcaaatttgcgcttcgtggattgggtgaggccttgcagcatgaggttattgcggacaacattcatgtctcgttgatcttccctcctgacacagagacaccgggtttcgctgaaggtatgtgctgaccattgatgcttttaagcgattgatgaactagcagtgagccatacatgttaaattgatggatttgcatctctgaatatattggttgccctatttaattttcacaggcacacactttcatattcactgaaatttctcaggcttatgtcactgtgattctgtgaatatatcgtgtacaagcagttttacttcaggcattgatgaaaccgatgccacttcgttggttgtacgtaatatactatatttgtcaaaatcatgatgtcacacatgcaaatagaattcagggccaaaatactcactcattcggttgattgcttgtgtgtttgccattgttacaagttgcattggacattgtacacaggagaaagtatcttttttatctaattctttccggcactctagttctggaggcactcttcactctttccatcaactaaactttatcagtactactatttcatagtcaagtgccttacacagttagtctgttcattaactggttgcagagaataaaaggaggccagagttgaccaatatcatagcaggatcatctggtggcatgaaagctgatgatgttgctaggaaggctttagatggcatcaaatccggaaagtttattgtaccctgcaatttcgagggagcaatgttagctgtagctactgctggtctatccccacagagttccccgctaacagcattcctggagattattggtgctggagtcatgcgatttgcagcaatttgcttccaatttaattggttcatgaccatcgagaactggtatgccaagaacaagaagcatgcgtgaaaggataagccgaacctgtgttcaagtcctccattgagaaattgtagaagttacaatgcaacaataaattaacttgttagttccagctgaactgaatgtaccatgctttacagataagtccagcgctcgtttttcatatgttttctgctctactatgagatcatatgaataatgtagatttctctcatcttttcaacaactgttctatccgaaactaccggggtcgtctgaggttgagtttttttctagatgtgtgttctttgctagtagatttttttagatgtttctttttgttagattttggcagtctataagctgtgagagtgagattatactagagccatattttgtcgagccctcgttttctctacgtgttctgctctactttggtaccatatgaacaatgttagatttctctcatcttttcaacaaacagtaagctgtcaacaactcgggttaatgatttgtcctatttgaagagagaattgctctggtacatcactgtaatcggaaacagatcccttgactttgtgcagtctgcagttgtgccactgacatgtgggccccacttttagtatggttcacatgtcagtggcacaactgcaaactgcacaatgttagaggagtctcatccctgtaatccctgttctagtgttctgttgaaattactctctctgtcccaaaatataagtatttttagactttgacacagtttttgagatgctactttgactaacaatatctataaatgtaaaatgttttaaataaaaaagagttgcatttatgatagtttgtttaatgataaatctagtaagatcaattttacataattaatcttttttgctattaataattaaaggtaaaaatgattgtctgtatgctaaaaatgctaatattttaggacggagagagtactgagattgagttatcttctagacgtgtgttctttgtaagattttttaggtgtttctttttggtaatgtatcagctatgtgagtggactagtggaggatatgctgtcattttctgtatccaaatctcacaggagtgggcctgtggggttttcagtatcttcttggaggcccaatctagtttacaaaagcccaaatcctaccaagcccaccagagaggagaaccgtgtacagtgtacactgtacacgcagagcctccggaaacgattaggcggcggcggtgcctgccgactgcgataactggagatagaggagcgacaaggcttccggtgctacgcggtcgaatcctccatggccaccacctctccctgcgccgcgccatccccatcgctacgatgccctctcgcgctctcccaccccttcgcctctcctcctcctcctcccgccctccgtctcgccggcccgaagcttctccccggccgcctcgccgtgtccccgcctcctggaatcccagcggtagcgtcagcgctggagtccctaatcctggatttggacgacgacgaggaggatgaggacgaggagaccgagtttgggctgttccagggagaggcgtgggcggcggccgacgagagggaagcggtgaggtcgccggagctggtggtgcccgagctggaggagctgcccgagcagtggcgccgctccaggatcgcctggctctgcaaggagctccccgcctacaagcactccaccttcacccgcatcctcaacgcccagcgcaagtggatcacccaggacgacgccacctacgtcgccgtccattgcctccgcatccgcaacaacgacgctgccttccgggtcagtacttcgcgcttccacctcgctcgactaaacctttttagcatccccactaaacatgcatacatgcagttcttgctcgtgtactgttcgacgaattgcctttgttgtaggcaacaaggggggcggaattttacacgccttcacacgctctccactctttgttactaatagtcgtgaaaaaattccaaaaaatattgagaacattgatgttaatatgtgctaaataccatcccacatgtactaactactagctcaatctatgtatcgaggaaaaaaaaagaccaatgtgtttgtgaagagtgcaagaaaaatataaatttgtctgtattctttgttttctcatttgtaggtccaatattttgtcttgaaattttttggagtgaaagatttaactttactctattatggaatatgtcataactatttcaatttgtggaatgaaggaattctctcttaagttctaaaatgactttttttcccccaagggaacaagttgtaaaagagactttctgaacacaaagacacaataggttgagacatggatgttggatggtccttgctcacttcactggttgttttcaggtgtatagctggatggtacggcagcactggttccgcttcaactttgcactagccaccagggtggcagattgccttgggagggatgggaaggttgagaaatgccgggaggtgtttgaggcgatggtcaagcagggccgtgtgcctgcagagtctaccttccacatactgattgttgcttacctcagtgtacctaaagggcgttgccttgaggaggcatgcactatctacaaccagatgatacagatgggtggttacaagcctcgccttagccttcataactccttgttccgtgcgcttgttagtaagacagggggaactgcaaagtacaatctcaagcaggctgagtttgtgtaccataatgtggtcaccaccaatcttgatgtgcacaaggatgtctacgctgggctcatctggcttcacagctaccaggatgtcattgatagagaaaggatcatagctcttaggaaggagatgaagcaagcaggctttgatgagggtattgatgtgctggtgtcagtgatgagggccttttccaaggaagggaatgttgcagaaacagaggccacgtggcacaatattcttcagagtggttctgacctccctgttcaggcctatgtctgccgaatggaggcttatgcccggactggtgagcctatgaaatctctcgatatgttcaaggaaatgaaggataaaaatatacctcctaatgttgcatcatatcataaaataattgagataatgacaaaagctctggaagtagatatcgtggaacaacttatgaatgaatttattgagagtgatatgaagcatttgatgccagccttccttgacttgatgtacatgtacatggatctggatatgcatgaaaagttagaattaacattcttaaaatgcatagccaggtgccgtccaaacagaatattgtacaccatttatctggaatcactagtaaaggttggaaatatcgagaaggctgaggaggtatttggtgaaatgcacaataatgggatgataggtactaacacgaagtcgtgcaacattatgctaagaggttatctttctgcagaagactatcagaaagccgaaaaggtttatgatatgatgagtaaaaagaaatatgatgtacaggcagactctttggaaaagctccaaagtggtctccttctcaacaagaaagttattaaaccaaaaactgtgagcatgaagctggatcaagagcagcgtgaaattttaattggtttgcttctgggaggcactcgaatggaatcttatgcacagcgaggggtccatattgtgcactttcagttccaggaagattccaatgctcattcagttttaagggtgcacattcatgagcgtttctttgaatggttgtcttcagcaagcagatcattcgatgatgggagcaagataccctatcagttttcaacaatacctcaccagcatttcagtttctttgttgaccagttctttctgaaaggtcagcctgtgctcccaaagcttatccataggtggttaactccacgtgttctagcatattggttcatgtttggaggctccaaactcccatcaggtgatattgttcttaagctcagtggtgggaatagcgagggtgttgagagaattgtgaactccctgcacacacagtcgttaacaagtaaagtgaagaggaaggggagattcttttggataggttttcagggtagcaatgctgaatctttttggagaattatagagcctcatgttttgaacaattttgcgagtttagtaacacaggaaggtagcagcataggctctgatggtacccaagataccgacactgattctgacgatgatatgcaaatgtccgatacagaaagagacgagtgaatacaatgttcaggcagtagttattaaaacctgaaggtatatctaaaggggcacaagtctacacatcttatcagagattcagaattttgtaatgcatatttcttgctttgataggcaattacttagtaacatgtagccctggttgatctacctatcttgcaatgccacgatagattagtgcactagacagtcctaggtaagaaagatgggaaagtcatttttgttatccttgctttgtacatgtaaaatgatgtattatacatttgatcagctagctattttcattttcctttgtttttctctgttaaatttaaccttcatgaaattttgcccataccagtatagtccttgaactgtactacttattccatcgtcagcagtattttcagttcattcatttatccgttccatggtttctagcgggtaaaagaatatttagcagaaagaattcaacagggaacaacataagattcacatacacaaatctagaaaaaaagaattcccatctagctatgatcctaagacatggtaaattctctgtttgagttagacatctcacatcatccctacaaatcatcatcctgcaagagcctgttcagcaaggtggtcaggagctcgtccctccgctcagcccttgcctcttccctgaccctcctctgctcctctcgctccatccacgcctgctcgagcatcagcctctcccgctccagcgcctgcatcgactgtctccattgctgctcgatggccgcccgctcctgcgcgtgcctctccagcgcctcctgccgtcgcacgtccagccggtgctgctgctccaggaagtcctgcagtaggccacggatgttgctcgacctcgacgtgccgctgccgccgctcgtcggcttccccgcagccctcatctttcagctccttgccggcagatgcagtaggccgcggtgaacggacgactcggccggccacttgagcttgtgtgcagcagcaggcgtagcagctcgtcccggttcacggccggggagctgtcgctcgatggcgcggtattccctctcgcgtgtggcgcgagggcggtaataaagggggcgcgtcgtacgtgcttacgtgttggcgagtgtggaaggggagaccggcaagggtccgcgtccgtgcaacgcgcacgggacaggagtcagcggccagcaaggcggaacggctacatgcagcagccattggctggattttcatgcgttttccatcgctttctgacgcaatctcaaaactccccgtccagtccgtcgatccgcggccgcggactccgctatcccttcattcacacaccgtcgttacggctggccggtctgaatggcgctggagctcggtcatgtccacacatcggctggcggcgccacgtcatcaatcgaatgggattcctgcgctggacccatccccacattgtcgactcgacgagatctgagaaactctcgacgtatcgaaatctcctggtccttcggctgcacgcgatccgcgacactgaccgctgctcctcggtccgcgtcacgccagcatgaggcgaattgatcacgttcgcgcgcgcgtgcgtgcacgcgaggacgcttgacgtttcacgacgtacatacctccgtgaaaaaacatcgggtgtccggttctcctcgcttgttagaatttgttttggtttagccggcgcgccgtggtgcagctgccggtcagggatggcgaagctcaggggctcagggcctcgggttgcatttgattcgagctgtacttcccctgcacccgcgtcttcccgtggtgacgcgtgctacgggccttgctgtgtgctagtctttgtgtgctaatctccgagttgaacctgtgcaccgcccttgcgtgcagcggtagtcgtcctcggcgtacagatttcagtttctttcgggaaggctggaatgcgtgccgtgcatgcctcccgatctcccgtggtggttgataagcaacattcgtgcagatctcggttttcttttgggaaggctgggatgcgtaccgtgggtgcgtcccatggtggttgatacgcatcattcgtctgccagtctgttcttcatccgatcaacaaaaataccagaaccagtataggcctatatgctagtctcgtcgagtattccacgatttgggagaacagtgggagcacggagaaagccgttcgctcagactcgatggatctcgggattgtgtgtcctaggttgaatctcgatatctaactttctcttggagctagatatttactccatccgttctaacatataagagattttaaacggataggatattttctaatactacgaatctagatatgcttcatgtttagactcatagtattagaaagtgtctcaatcgtccgaaattcattatatttttggatggaggagtatatccctagtcatctcatattccaagggaactcgtaaagctatttttgacattctcagtctaagtcttttagactcagacttagactcatagtattagaaagtgtctcaatcgtccgaaattcattatatttttggacggaggagtatatccctagtcatctcatattccaagggaactcgtaaagctatttttggcattctcagtctgagtctgattaaatctgagtaggtcttcttcaaccatgtcaaatccaatctttctttcctcgccgtgtaggctagggcatgacccctgttgtcgaaacgacaactgcatatgtcgaaagacgtggttactcaatagtggttgaaagtaaagtgtattgattagagaatttttcttggatccccctattacatggccctatgagactatttatagctccttttacaggttcttactactagggttttggttatacaggagaatttacatggttacccttatgaaagggacatttacatgggtacatagtgtaatagaggttcatggactcctaatgggccgttaggcaatcgtcggtccaatggcccctaggcttgttgggccggaaaaggcttcttcggccctcgcggggccaagcttgctttgcgcgcaagttgtcgaaggtctcctgtaggtcggacgtgtggtcgaaagccttgcggctttttacgacgatgtcgtcgacataagcttccacatttcgccccaattgcttgtaaaggaccttgtacatcagcctggcaaaggttgctccggcattcctcagaccgaaaggcatcctgaggtgacaaaaggtgccgaacggtgtgatgaaggctgtcttggggatgtcggccgggttcatgcgaatccgatgatagccggaatatgcatctaggaagctcatgagttcgcagccggctgtcgaatccacgagctggttaatccgtggcaaggggaaatcatccttcggacatgctttgtttaagtatgtgaaatcgacaaaaatgcgccatttgccatttgacttccgcaccagcactagattcgccagccattcaagatgatcgatctcttgaatgacccttgccttgagcaatttttggacttcggcttttgctgcctcctggcgatcaacggacatcttgcgtagcttctgtttccttggcttggcatccggcttgactgccaggtgatgcatgatgagatctgccgaaacacctcccacttcatcagggccccaggcgaagatatcaatgttctttttgagtacctctaggatgttcttagcttcttcttcgcccatgtcgccccccagtgatacgagctttgtggggtcggcatcatcaatctgcatcttgactatcttgtcgtgaggggcgggctttggcgcgtgcttcgcccggtcatgcggttcggcctctacattgtgcactgctctgttgattatggccaaatcaccttttgaagcagccgaaggctgaagccccttaaccacgatcactcctgccgggccgggcatcttgagcttgagataattgtgatgggaaatggctttgaatttgttcaaggttgcacggccgaagatggcgttgtagttgtatgggatgtcgacaacgtcaaacaatacttgctcttcgcgtctgttttcccccgtgccgaaggctactatcaactgtgcttggccaagaacatgaactgcttctccgccgaatcctcggagcgatgtcggtgctggggtaagggcttgggtagtcaaccccatcttggcatatgcttcggcaaagatgacatcagccgaacttcctccgtcgaccaggattcgccggacctcaaaaccagctatctcggctgagatcaccagaggttcttgatgcgggaacattactcctgcggcatcttctgggccaaaaaagatttgctggttcagatactgcggagccccttcgcctgccgaagtgatattgtggaccgttcgcagctgcatcttcttctatcgcttcgacagttggatcggcgggtcggcccttgtaatcacttggatcactctgtgttgcgcatattggcgctgttcggccgggggtgcttgttcttaagctacttcacgagttgcttcagctgctgctccctgctgcgtccttggatcttgcgcgttgccacgttgccgaatgtttcggcattgctctgtggtgtgcgaagagcgtccgtggaaggcgcagtagaggtcttttcggaccttcttgcggacaggctgctgatggttgcttgcttgctgatcgttgaactccttgcggagggcttgcacttcttcgacagccatcacagccttgcccgcacggtcggttctgaacttcctctaggtcatgggggcttgaccttgccttggcggttgtgcttggatctccggctggggctggcgaacaacgagaggagatggtttggcaacttgaacttgttgttgggcttgagcagtggcgacagaagccttatcgtactcagcttgtattgcttgccgtcgcttggaatcctcttcgccccttgcgaacccgtcaatgatgcgaagtaggtgttcaagcgtctgcggctccttgttggcgatttttcttgtgagttcgccctagagtaaaccggccgaagcagcgtttatgacttatgcctcagttatgtcttgaacttggcaccgggcttgcgagaagcgacgcatgtactcccttatcgactcccccggcctctggcgaatgtcgagttgatgctgctgcgtcttcggctcctcataggtgcctcgaaagttaaggacaaagacatcgcgcaattgctcccatgtgtaaatgctattggctggcaaattgaaataccaagagcgggcgatgccgtctagggcgagatgtattacctttgccttggtattttcgtcgccatgagccgcttcgatcgcggattcataaatggagaggaattcctttgggtcagtttcgcctaagtagcgtgggacgggtgggaacttgaactggggtgggattggacgggtcttgattcccccactcagcggtagccccttttcgccccctgcgctgttcacgacaccttgctgcgggtacggcgtggcgaagggcgaaatcacggcttgcgcgtgaggttgggccatggcattcggctgctcggccccgattggtgatgcttgctgagccgccatgaatgggtcgaaagttggctgtgaccatgtcatggtgacctggtttggtgcttggtttgctccgaagcctggcaacattgatagagtcgaactgcggtccttgactccacggcgaagcccctagacctggctgattcgaaggcaagcaactaggcgcaccttgacttgtattcccctccgggcgggccgaaggcgctgtacttgaaatgttgtggggttggctgagctgctgaaggaaagcttggagctgcgcctacagagccgaagccccttctgccattgtttgtggcacttggccaggctgttgaggatgtacttgggcagcgatcggttgagcttgcagttgcacgtgaggggccggatgcgctgctgcggtcgatggctgcccagcgaagtacattggcgcttgcgcgacttgtggcggaaggggctgggtcggcacttgtagatagacttggggtgggacatagcctgccgaatactggaggattggtgccgaagcgaccttggaccgccttgccgcctcgtacgcttgctgctattcttgcatttggcgaagcatgtcttggagtcgtgtcatgttctgtcgcacggcttccatgtcggcttcggtttgtgtctcggggtcagggtagacttgggcttgcacagcggcgagcgcagtttgggccgctgccggctgcgacggagcggcttggggcaccagcagttggcttgtcgaaaggatctccgccctggtctggagtgcccttgccgccgcagccgccttcgccatggcacataggtagcaggggccgaaggcggtagtgatggcgcaggtgcggaagcagatggcgctcccccatcttcggcgataagcgccgaaggctctgctccctcttcggcagccatatccaccccggcgtcgctttcctttcgccttgtaaccttctcctttacgacattcttcggtggcgtttgctctcagtggttttgctcggaggtccccacggtcgacgccaactgttgtcgaaacgacaactgcatacgtcgaaagatgtggttactcaacagtggttgaaagtaaagtgtattgattagagaatttttcttagatccccctattacatggccctatgagactatttatagcccctattacaggttcttactactagggttttggttatacaggggaatttacatggttacccttatgaaagggacatttacatagatacatagtgtaatagaggttcatggactcctgatgggccgttaggcgatcgtcggcccaatggcccctaggcttgatgggccggaaaaggcttcttcggccctcgcgggggcaagcttgctttggcgaagtcgtctcccttcggcatatactcttcgccctacatccttcccccaagaggcctccggcttggcagagtacccgcacgatccttcgcctctcgccgtccttgttccatagtcttcgccattggggggggcttcgccccgactaactttgacgtctcgggcttggatccccactcctcgcatagccttcggcaggttttggtcgaagggcctcatgccataccgccaacaacccctaatctaggtatgtctctagttgtattacccctagcgaaagagggcaatagggatagtggtggcgatgcctggtcagaggtggcggggttttttttcgtcgttgggcccaaggcagtggtcgctttgtttgcaacatccttctcatagagtcgcacatcatcgtgagcagaggccaatgaaagtttgacggcctatgctgaggacgagattaggggtagccagaattcacccaatgattgacctgtgaagccctaaaagtatgaacctccccctccccccccccaaaaaaaaaacttatcataattcacaaatcattagaaaaacatgtgtatgcatttaggcccaattcaacccccattctactcaccgtcggtatgaaacaaaatgcaaccataacctcatgtttccctaattgtcgctgatgggtaccctcaattctccgaccgcatcacacgcacaagacgacctcgtgcatccgcctcccgacacaacttcactatccgctcatgctcacttgcaactctagggcttttgctcccatgcggtggcctccacctccacctcccgagctcccgcaggccgcaacggtgcttcttccattgctacacgcctgctctcatgcatttactttatctttatctcaccatctctcacatggttgcctgtgctacatgtttaggatagaaaaatacgaatataatcctctatgtttagaaagaaaataagcgcgggcgtgccagtgtacctagatacacaatgtaaaataaacacaaaagagacacagaaacacgtgatctttattaattgaattaacaagatacagtttccatgtataatataaaatacgcgcgccattgcctgtcgttggacagatcttgacatcagcggtgtggtcttctggttcctggggtctcgaaagactcccatttaattacctccgcagatctacacctgtaggagaacctccgattaagttgcttgtggtcgtctcgtcgtcttcgcttcacgttctccatgcatgatgaatgttggtgaagatggtggatatatatatgtgggcgccggcaacgcatccacggcctcgtcggtccgtgcgccgatgttggtagcgtagccttccatcggcttcgcccaccctcgtcgctccgcctcatcagtcttgagcgacgtggtggtgtagataggttgatcttcaacatgcatgaaactcgcatagcttggacggtagagacgtcacagtagtagcgtcggaatgatgttaaagggaagaggaattggtgaagtcagttggtgtacacaacagccgaatatacggtggctaggcacctcctggctaggtgagatcaaagtgacgaagagttgacaaagacggttggtgtagacggtagctggattacacatggctgggcacctcttggttcgtcatgtcccttatacaacagggacttgcaatgaagatgttgatgaagaagtcaatgtagacaatagccggatgaacgtggctttagcaccttcggatgatggatctactattgatccagttgatatgatgacgagcccataaaaggggctatataagggcgccggtaacgacggcgaccttggaagaagtaaatgtctcttcggcggaacggccgaggacattgttggtgtagattcagcacgaacggttccctagcatcacagacggcaccattcttgctttatgttgatgaagatgagcaacactccaatacacggacgaacagcgacatcaatctccacgaagaaggagagaatcacgaacgaatgacatcgattcttgacaagagggggaaagcgccacggacggacgacacagatcttgacaaagaggggaaaagcaccatggacggacaacatctcatctcggcataatgaagagaacgcatcacgaacggacgtcacgatatcatgttggtgtggagaggagacgtcacgacgacgccggcttgacgaggtgaagacattgcggacgaacggcgcgatgactgcaaaccatgatgctccggcatgacgaagtgaagggatcatgggccggcggacttgacgacagcgtgcgggcacccagcagtggcactccggcattgcataggttgagtagatgttgatggtgtcgccattctcataggttgcgaccagcaaagtaaggacgctcgacgtcttggcgacgtcgtagcatcaggtagatgcgatcttcggcacgctccggctgggtggcgtcacaacggccttctccggcaggtggcagatgattgttagttgacggagatgagcgctgcttggcagcgcctcagcgactcggcgaagaatagtcatcgcggacggatggcatcacaagtccggcgcgatgaagcagaggtgtagtagccgaacggcacgacgacagtgtgcgggctccgggtagcggcgctccgacaggcgatctcctcgagcggctcaacgacgagtgtaaggaaaatggcaggaccgtcgaagatgattgagtagacatcaatggtgacctaagagaccgcggcgagcgtgaaggcgtcgccggccagtggagtctcggtgagatgtcctcacacagtagagatcacaacgccgacatcctgagagcctggcgtcggtgcgatggtgccggcacaacggcaaactttgacggggtggcactcggcggacagtgtcaccagcagcttgacggggacggcgagcgtctgggcgttgccgataaggtggacgagatgcctcccggttgacgatggggctgctccatcaggatggcgtgggtggctaccggtgtgatgaggatatgttgttcacggacgcgggcagctcagcggagtctgtgtcgttctcgacaagaacttctggatcaacatgacttggcggcgtccgcggctgctccgacgatctccggcgcgccccgacggagtggcgtcacgatggtcttctctggcggacgggtgttggtggtgtcacagcgttgggtacggtagtgacactaccagtggcttgaacgggtgacgtcaatctcgacggaggcttgcgggtgacgtgaatagatcggctggcccagtgaccccgggcgacggcaatacacccgacttctccctggccatgacaacagattggaacgacatcgcctcgctccttcctggcacatgtctcctccttggcgtgcgcgtcctcacgccggacgctggggtgtgctgcagccgtggtaacctggccaccgagcgcacacttcctgtcttagacgccgaggtgcagcagtgaggtcgccggctgccgaggtcaaacgccgttgcttgccgtcggaaggtcgcttcgtgggggccggtagatggatgctggccgtcggcgcgtgcgcgtacgacgtagatggctttctcctcctttggcctcggcctccctgccgggccgagcgccggtgaggctgtgcacgcccgcccgccgcgctggaggcttctctgctatttgatatatgctgtggatgagatgggatcggagtagatgaatatggatgccgatcgcctggcgccgtctcctgggtggctgcatgtaccctcgccgagcgtcagatgctgccggccggcagccaccggtggcgcacacgttggtgtggcgtcgtcggccagcgcgtcctccggccaccggccaactccacatcatggcttcttctcctttgtctgtgctccatgatcaatctgtaaaaagacaataacaaacaaaaggatggagctgtactcgccgacgaatggatgtgtattgatgccgatgttgacgagtagtctacaggctgccggagcaacgcgccgatggttttcccctccgtgatcaatctatggtagtagatcggactgacaccagctcgccggacgccgatgatgtgcgctgatgccgcctctcggcgatctgcccctcccgagggacaccggcgtacgtgatactgcttcgccgccggccggtgtgttgtcgatggatatgagttgaagatggctgggcagagacagatggatgccgatggatagaactgtgtgttgatagattgatctcgatgggagttgattgattgtccatggcctctggctggctggctctcggtggcttttataggcgctaggaaaacctaacggatgggcgcgtatactccagcgccgccggggccacacgcgttggttcgctccgaagcctccggcgacgttgctgcagatcactttcatccgaatcacctggataaggcggagtttgttgcttgggtttatccggcgccagccgcgcacatcagtagcttgcggttgagatatcccgcgtacgcgtgtattctgatatacaatcgcatatatacgatgagaacgaaatgtggccatgggctgccggcccacgggcagcttcacatttccaccgtacgtgtagctagctgttgcttcttaactcagaaatcacgcggtatttctatacgtatacatgcatgtacggtgaatacatatatagcgctcgtgtatgagctgctcacatgtcactcaagtctccttgtgcatgcatgcatacgtacagattagccaagcatgtatatatatggctgaacacacacatggatatagccatatatagatggacatatatatgtagtacgtgcatggctcatgcatcccatgcaattgagcaagctatatacagtctcacatattaacgaatgcgacgatcatagcagctcctttgtttgcttgtcttgataatacaaatactccttggatttataagatcacaaaataccgtcaaacactacaacttattggctcttgtgtaaggtcaaattaagcggtagagaacccgctgggaccaagagtgagggaggcttctctcccaaagaagctagtgctagagttaggggatgaaatcggggaacagatgcagattgccctacccatttcttattgcctaccttataaaggatcccaacatacaatgcggatgcttgagataggatctcgtctcctagcattccgaaacacgtggcgttaagttccaggccaaccaaaacaggccgcgagtggtcgaggtacctcttgagagcgttgtcgaggtgcctcccttccctcttcaaagggatcctctaggtgaaaatcttatccttttgggatgagcgatgacagcatttttaatgttgtgatcttattgaaggcgtcgttttagaggtggctgtgtattcctcagggtgtggtggtgtgtgggcacgtggcgtggtgtgttttctcttttatcgtgagtatagcctcctagtgctataatcttgtattaatttgcttctctcaaagtcttaatacaatgatgcacaactcttttgcgtattcttgggaaaaaaaaacagggcgcgagttgggacctatctcgtctagccagctactccctccgtcccataaaaaatgaatatatgaccagatatgaatattctagtacgatgaatctggaataatgtatgttcagattcgtagtattaggatgtatcacatccgatattaggttggttttttatgagacggaggaagtatacaatacaggacgcccttgcatcataatcctgttccggcctgcccaagtagaaagggcctcacgtagacggtaatcccgttccgtcccaagtatagcaggccgtacatgcgtggcaatcccgttccgttccggcccaacgagaaaatgtggacttaaaccgcagtgccgtaacccgttaaagacacagccagatctctagtcgacacacgccggccgacctccatctctgcagtgccaactgccatgagatgagagtagcaaccgtcttcaagctggacaacacacgaacactaggggggaaatggaaaatggaactcaccttttgaccgaagactagtagacagacatccttcggacattccatttgaaggcaaagacattcggcgagcgatgaattattttacctcgactcgaggtacatgctttcatcaacagttcaaaaagatactactctactccgtagcatcggtttccttctcgagaaacgactcgtcacatgctgacattgccattgggtaccgtggcttttgctggccgcacaacaatgatagttagtactctctccgtcctaaaataagtacagttttacgctatttatgtctaacatttaactatttgtcttatttgaaatttttttatgattactattttatatttttattgttattagataataaaacataaatagtactttatgtgtgactatttttttaaatttttttataaatttttcaaataagacggatggttaaacttttgaggtagtacatgctctcacacagatgcagctgtacctcaagagtcaaggagtcaagacaggattaccattctccatttttacattttcagaaagttacaccaaatgattcgttcgaaaaataaaaaagaaagttacaccaaatgatgaggatggcaatggtttggttcgactccacttgtccattaaactgatatataaatttactctaatgaaattttaggttcactctaaaatttatgtctaaaatgttcaatctaaaacagcttcacatgtataaatggtctaaatttgtgcaaatttgcttctctatataataaatcatttctataaaaatgaactgaatttaataggtttttatattatgaacactgatttaaaatttttggtccaagttttatgcacgtgtagtaaattttctctcggtctattactctgtataataatcatttctatgaaaattaactgaacttgaaaaatttttatagcctgaaaatgagtttaagaatttttgtcccagttttatattgaaaattacttgatctattagtaatatatagttgattcatttggatgtctatgataacctatcaatataatgcatgatctcgtggtggattgatcattatagatcatgaatctagaaaaaatagtttaggctcgatcctactcctccatcctataaaagacgaatctagagctggatataacacctaccctcgtctcaagaaaaaaagtccaattctagctacgaatctggacacatgcgtatccagatttgtagctagaatttatttttttaagatagagtagtatgttcaaatttattatattatgttgtgttacatctcatgttagattgggtttcatgggatgacggagtattaaccattccaatcctgacggaatgaactctgctccattatcctcgcagaaacctttcccgtatttgctctggaggctggacttccactttctgcagagtgcagatgtgcctaacactggcactgtattcaatccccgtgttcactgttcaattcaccaccactgcacgtcttaacgtgcggcatcaatggcaggcgttgcgttgatgacgagatcctggcgtacgcacgcactagatgatacccaaggggaaaaagagaggacacacgagctcacacaagagacgcggcccggcgtggaaaccgaacgggggccgcccactctgcgttttgcatcggcagaggcgcggtggagaaaaaaaaaggccgagcttggatggaaagctccaagcttttgcgctgttcgcttgcctgagccccccgtcccgtcccgtcccctcgcctcggcaagaacaaagagcatgcgagattagatcgagacggcgtatccggtaagcgctgttccatctccggcacaaaagggtgagttcttgggtggttggtttggttatgtgtgttcttctgcagctcgtgtggttttatctgtatctcgttttcgcgctctcgttaggatggcgaatgggggtgtctgcctctcgtgctctgcacttgtctgcgcgctggtgtttctcacggtggatggtgatttcgtggacattacttacgtagcgagcgctgtggccaaaggcgcaggtgtggatgcagctgcttctctgtcattacttgttcattcatactgtattagtatctctttttctctctctctctttcctgaattagtatctcgttgtgctaatgtgcattcgatggtgtgtggtgtgatgtgctagtctgtttggatgggagccccccggcctaccatctcgcccggggttttggctccggcgtgaatagttggctggttcatttcgaggttagttcttgtgaggatagcagtgcaattgtgctactggagcctagaactctactacaaatgtttgcccggctcaattttctgtgtctttcttgcaaatgttagggaggaggatggtgcagcaatgtgacgacctgcctgcaacgcaaacgcactcggttaggatcatcgaagcagatggcaaagcagattgccttctctggaatactgagcaacacccctgattacaacccgggtactgtatttcactagttgtttgaaggaaataatattttgtactatgttgtcctagttctctaccacctcaggaattggactgcctaggctccatgttactacttactttttttttaagataatgttactacttactacttcctccgtttcacaatgtaagactttctagaattgtccacattcatatagatgttaatgaatcacaatgtaagactttctagattcattaacatctatatatgaatgtggacaatgctagaaagtcttataatatgaaacggagggagtagtatagttcacatgcttgatcgattcctgtgcaatcatcaaaaccagatttctacaattggaacaaggtcaaggttcggtactgtgatgggtcatctttcaccggcgatgtggaaaaagtagatcctgtgagtccatagtccattctttcttgattttacagttacaaattgtatgaggattagtgctgctccagtgttaagtttctctttgattttgttccatatggataggcaacaaagcttcactacagaggtgctagggtgtggcaagcagttatggatgatctgcttgcgaaaggaatgaacagtgccaataatgtatgttattcttatgagcataattcttgacaacaagaaggttttcaagactaacgaatttatggcaggctctaatttcgggctgttctgctggtggtttaacttccatactacactgtgacagatttcgtgaccttttcccagtggataccaaagttaaatgcctttctgatgctggtttcttcatcaatgagtaagacaatactagtacaaaaggcagttgaaggaaaaattaaatgcattatgtatttttttccacattaaggatgtactagccattttaatatgaaggacaaaccattagtatattaacttagaacaaaaaaacaccatttctgaacattgagttcatgtctaacacctatcccatctttgtgttagcaggaaggatattgctggagtggagtacattgtggcctttttcaatggcgtagctacaacccatgtatgcacatacagtcattactctgttatactagtagatagtcaaggattctacacacatgcaccccccccccctccccccccaaaaaaaaacttacctggtatgtaaattacaaattaggatcagaatttaacagagtgaaaagcaaaccatcattttccaaagttctatttcacatatatttgcattgttttctcctatacctaaatacattttgtacaaatgtgctagggatcagcgaagaatttaccttctgcttgcacctccagattgtccccaggcatggtaaggtgtaagcttcaggcagttttacaatacgaatttagacaacagattacacttgaatacttgttaaaaacatgttgctttgaatgcagtgcttttttcctcagaatgaggtgaaacagattcagacacctttgttcattctcaacgcagcgtatgattcctggcaggttatcatctgatccacgttctgcaatacttctatgattatgatccttttagtgttgcccttagataaatatgctttgtagtggcatatgttttggcattgtggctgtgtacatccgatttggatgtagaggccagactttaatccattttctaaaaatatgttttggcattaatttaggtctcgtgtgttacaggtaaggaacatcttggtgccaggatttgcagaccctcatggtaaatggcatagctgtaagcatgatatagatcaatgtcctgcatcgcaacttcaaatcttgcaaggtaggtactagatagtgtattggtatgtaatactgcattttctagttggccagctatcgacccagtttaaaaattgcatggattctaaatgccatcacaggattcagagacgattttctgaaagcactgaaggaacaagggactccctccaccagaggattgtttataaactcatgcttcgtgcattgccaatctgagacgcaggagacatggtttgcatctggttcccccatgcttgaaaccaaagtaatactacatccttcaacttcaacaccacttaactcaaaattaaaccaaagttactactagagccggctactgctagagccagctatctaatgatgatctgacaagagctcttcacacttgtgtagacaatagcggatgcagttggagattggttctacgaccgcaatccgtttcagaagattgattgcccttacccttgcgattcaacctgccacaaccgaatctacgacgacccctcagaagcatagcaattacagaaacctcacctcgtactaccattcatcacattgttatatttgatgcacccttattgctcgcaatagggcaatccgtgggcaaccattgattttcaggaataactgcagatgatggcttaaagctcatctgatgcctggaggctggatgcagcttccaacagtagttacaggtgtctccaacatttgattcgctttgtcggcaatattttgccatatcttcgataatcatcgacaaagtccacattaatgttactgaagtgacattggacgaacacgaaacacgaaaagtttatctggtgaggggatggataatgctattttctcgaaattagctcaaaattcaagtacgttcagtgagattttcgaaatcaaagtggagcctaaccaaactgcgctctgttaacctgtcaacggcgcctcgccgccgccgttgcgcgtccccgccggccatcgatgaagagctccggcgtgagatcccccgtatctccaccgcatatcaccacgtctgcacgtcaacgagtgccagatccatttctgccctcgtcggcgtgacgaacgacggcggacgtacgggcggcgctgatgagcagagcgagggatgcagcacgagctcgaggaggggatgatatttcgtcgattcatgcaccgatcggagtgtgtgaaggagcttcttctagttgatctcgatagactacgttcagattcttcgctctatctagggtgcaggcgtgcggcactgaaggagacaggaggtagaatactgaacacaaagatgtcgacttgcccgatgcctcctaacacagtgccacacttgcacaatcagaggaggggagatgcatgataaatggagcacacacatgtttttcctccgagggaaaatatcactcgctctctcgctttgcaaggctgccagtttatatatctagcggtgtacctactgggagtaaataggtgtcagcgaagcatcttgtctttaatttggatcaatcacacagtagtggtctgatctgatccttttaatgacacggtattattactgggcggattgtagcgtttgtttttttcccctagcgacaagggcttttaacaaatcttcaacgttttgaagcatttgtactggtctggtttgatttgatctgtctaaatcgtcagaagtcacatgaaaagcatggcattctgaaagtaggggctgctcaacttctttttcccgctgggtttttgcagcaggcagaagcctccgctcgatgtataacaaataaaccaaaaacgaaaagaagaaaccaacagagaatgctacaattacagacccataccatacagttctatgagccggagcattgcgaagggatcaattagaggaatgcaacaaactgcaaaatcaacagcccgtaagcaatgcaaccaagagttgcaaatacaaactactaatgcaaccaattgaatggcattcctccagatccatactagaaaatccttccaaaatcctttcctgcaaaggaagacggcagtccgcctgctgtaaaagagtgaccaggccttcctcctgcacaacattcagaattatgtttcagacataaatatgcataccttctatggtttccaaatgcatgcaccgattgaaatgacttttaagctataataggttaataaagataaggcactcgtgaaaaaaaaatggaagatccaattggaaagcaaactatatcaacaggacatacatatctcatgcatgaaggttacaccttttcttttggccattgcagtcccatgtgcaattacaagcctagaccaaacatgtttcaatatactattaaacaaaatttgccaataaactatgtgtactgcaaggccattgttctgaaaattaataccaagattgcaagttttcagtagcacatttagttaagttggatacctcaaaaaaaaattagttaagttggactagaaggccatgccacataaaaaaagaggaccacagatggtagtaaatctagtgctacgatagcttttgcagagtcaatggctataccaacaacacccaattaaataaaacatacaaatgacaacatggaaatattaccccaaggcattccgtcagccatagtagcaggtggaggttctgccatgccataattaggccatacaggctgaccattgtgatgattccccattggacgtaggtagctcgcagtcatatggttataccgctgaaatggttgtccatggcgactttgaaaattcagctgagaatagtttgcattatggtaaccatcataggtcacatggcctgtagaggcactactctctgtaagagttgatgcatggaacaggcggtcacctctataggaaaagcatgaacaatgatcagttaataatactaaatataacaatatggaacccctgacaatatagcaccacccaagaaaattcaaaatattttcagtggtattactctcaataaagcaacacatagaaaacaagattcgtgtaaaagaagcacctcccttatccagttatcccttaagatgtttattgtcatgaaacaaactgttgcactgagaggcattacattttacaccccacagcgtctaataaacgtgtatgaaagctctttcgattctttgtacacatgccatccaaaatgacaatcatacccttacatatgtatataatcaaatccatttgttagcacattacaattttagcatttgtaaaaatggtgaataattaagcagaaaccagcagcacagcacaaggtgggaaaagtgaagtatgctttttttttcctaaagatatgagcgaactatacagagagcaaatcattgtagttggattgtaagcaatctatcagatgaggggtgcctctattatattagctttttatgcgtcggccaaatgtcattacatgaacaaattagaaaacacttaagtacctttgattcatggataaagagtttgagtttgcaatagcatggctttggatatgggccaatctgctggattggtttgtttgaccacttgcatccttcaggtggagatcgctcaacgcatctgatagtgaagtgtcctcttgcagaagtgactcttcgctgcacatcaaaacaaagtgaaaaagatcaacacatgttacattacaaagacaaaactgtatgatgcactgttacctatagtttggatcccaatcagctggatccggtattgatgaggtggaagccagtgtatctgctgacacattggatgagtgcgtaggaggaaaaccaccgtatcgagatggtggaaaggacccatggttcgaagtgtctgttgataaaccactgccagcgcatgtatgtggtctccaactgaaatgaccaggattagggagtgcactttgtgggtaaccagaatgtccacgagcatagccatcaaagtgattactaatggtgccatccccatggtgtccctgagtcagctgagatgtgtattcatgaggcggcattgatataggtgggtgaccaagatttcttcttctattgtattggcctacagcagcagcttttcccaatgagccatgactgctccttgcaggagaagtggaaccatactttcctgtagcagtacttgggatttgcatctgagaatttggtggagtaaattgtgatggacttgccccaagagacataggccctggacacccagggcttaatcgaatgccaccaccatgatagagataagatcgtcgtctaatatctggactagatcccaaaaatgttcctccggcttgtgaatgtaaattgaatccagaagggcctagtggtgaatgatacatgttcacactgttgacatcatagcttccatagctgcttgcaagacctacattgtcattaaagctaccatggctaccgaagctgccacagctgcttccatatgaaaagggaatctttggtgcaaaagcgttattaaatggtaggcctctgttaatgcttccaacctacaaacataatcaacaatatattatgataataattatcttacaactcaccaacttaacaaaagcataagagaacatacttacaacctgaggggaaagaccagcagctaaccagtgacctcctccaggattatgatcaactgctgcaacacgaccaacaggctacaatggcacaacacaacaagacataagtatatgacttacggactacttgtatgaaaaaaagggagcgcttaaggtacaagtattttaaggtttctccacattgtctactccctctgatttcagatatgtcaccattgactagtgcaattataattttgaccacaacaaattttgaatggtggagcatgacgcacaaaagttttgtgatatttagggtgcaacacacttcgttaatatgacatacttttaagtatttgtttttttcaaaaaagacgagctgtcaaagtttgaagatgaatagtacctagtgacaagtatttgaagacagagggagtagtatatagcaatatatagtctgttggtgggaagaaacactgtttcatgtatccatgtttgttataatgtgaaaggaagatatctaaatacctcgttcaattaaatgcagagcaaaaccaaagtcaattgttacaaatgatggtcgttccgtatcaacagtctctaaggagagaaaaattatacagcaggttgtctggaaacaagatcatacttacaattcttggagtctcctggataggctcatatggaccagtaaacgcttcaccagttatgaagggatgatatgaagcctgaaataggttcataattgtgaagtacttccattgattattcaagaagaaaaaaaaatagcgcaataggaaatcaagttaataatttcctaagtaccaaactgacctgcctaaagctcatttatttaacggctacgaaacaaggattccccagcatattcagatattgggattaataagacttcccattcacaatcaaagagtacaaccaaataggaatcaaatgttatcatcagtgaatacctgcaatggtgaccaccgcttattaggatcaaactcaacaagccctctcaagaaatcaaccagtgctaagcgatctgtcttttctgtctctgaatcaaaattgaaataggtgagaagataatgtcaaacctgcaacttcatcataaggactaggatattatcattcaagagactaatactaagaaataattctaagttcaccagtattattagtatcttgcatgattctggtatgtgccagcattgctaacctattgttcatacacctgtttaataaagaactgcaaccggaaataaggtatagttaactaggttgatcatttcccaaaaggtaccgctatagtatgcaacactatcagttctataacaactactgcaacttcctgggcacccattataatttatgccacagtatagtcgtacaccaaaggcaataaaccttaaggcaatgcacaccaaatgaaccacgtattccgcaagaaacgctaattactgggtctgccatattgatcactgctagctgagattgttctagaataaacacagtttcaaaatcagctgtaaacctacttagctccatccttaaaaataagtatcacaaaacatacctggcaagttttccccattcaaattcttccaagggtatgtatatatgagtttgtcaagccttccacgagggaaataccatcttcctacttttggttttttggactccctctgtgttgcaggatgtaaacagggtatagataagtaataatgaagtaaatgtataggacaggacaaatatgtaaccttaaaaaaaataaaaatattacagtttcaatctcctcttcagttaatattctgtacgcactgatagggccattctgcatttcaataccaggataaatacttccaacttgcttaaaaaatctcccagtatttttagcctcccgtagcagatcatctggtggttgtccactgtataagaaaaaggcaaacatgtttaaaaacacttttgaatttccataaaagcaatgttgtaacatttctgaaaagttaagaacagaagtgaaagaactcagacagttacaaagtaattgaatataagttattttcactgtaaattgttggttgtaatgaagaaaagggagggaaaagttcaatcagatgtactaacccgagaatctcaatcatacggcataggacatcgtattctgacgctccaggaaataaaggcaatcctatatatagttcagcgactatacagccaaatgaccacatatcaatggccgtggtatatctagtacttgttaagtttacaaatccagatgttagaattcacaaaagctgcaccacataatgacaaatttaaaatggacataacagagaaaaacaaattaaaagcataagacatttgtgcagctttaaggtatttcctagtgaaaaatagatgtcacacaggatacgggtaaccaagaagtacttccggagatctgtaataccgactctggaaaagaaaaaaaaaaggagaagcttctttaaatcaacaattttactataacatgaattcagagttcacactgatgggtgagtttgaatgaaacctgaatatacgagtaaatggttttaccctccaagcatgctgatccaaaatcaattactttaaccccagctgctgtttttacactgcaaagatatagcgtggatggattaatagcatgcaaacagtgaacaaatcaagtgctgatttgagatgagacaactaactttggagttatgagaatattttccggttttagatcacaatgaataatgccagcgtccttcatgacaaccaatgcatccaatatctgaccaataaagaattagacatagataatatggtaatcaatgcatttaaaattcaaaaattcaagcaccatatgaaaataaaaccttacctgtctagagaaagttcggacatatttcagttgcaaacctcttagactattcctttttagcagctcataactagatgtgggagtttaagtgatacatgaattagttacatggtatataatagattagcgaagagaagtacgacaatcttacaggttatggccaagcatttcaaatgctatacacaaatgattttggtagagaaaaaaatccagcatccggacaatgtggtgttgatcatcaggatcatatttctcattcagctgcaagattgagcatacacagttgtgatgccagtcgttacatacatcaatcacaagtgagtaaatgctaggtaaactactgtaccatgctcaacagtgagacctccatgatagcttgctgataaaaggcaggctgattttttataacctttactgcaacatagctgttagtttctccatcccagcatttagcaacctgtccaaacgtaccttggccaagcatttctttaataacgtacctacttagaacaataaaaagatgagtgcagtccaatctgatgctgttcatagtttaactttagaggtgttttacaatgctctctactggtagtagaaccaatctagatcattttttttctccaatagatcatatctatttatactaccacatcaactactggtagtataataatattttctactggtagtagaactcataaattaatagttgagatcacttctattggcaataatacttgtagtagaatactagagagcaccgtaaaggtactcttaactttaaccatcaggaactctgataaaaaaaatatgaacacaaagttgaattgatcaattggatagctttatcgcctaagttcaataagttgaaaatttgaaagaaactacaatgtgtggcaatatggcagtcctttggacatatttcatcttcccatatttccacatctgagttcttagtataatggagagtcagaatgtgcatacatatttctaacttataacataaaaaacaaaatagtgaaaagagatatatctggtaaaaatgttttgagtgctctaactcactaagaaatggacaacagacacaaatattgaatcacataaaagggttaacaagtcaagaagaaaactaacctccggtccgactttttattaaccaattccaagttgacatacaagatgaggtcagaatttgcattatcaaggccatcattgtgagctggaactgaagggttggtgagaaagcgcttggggttcagtgaatctgagtacttaaactcaggattgcattttccgaaagtttggacaatgtctgtggttaatcttgcaacaaactgcaggaataagaaaatataatttagagtgaagcatcacaagtatatgaaggaggtgtcatacacagttgaacaattgtaacaaaaaaaatgtcacatagactgttccctcatcattttacaatataatacattcagaatatcaacaaagttgaaaattgtccctaaagtattgtgcttacccctggatgagatagcaaagttatgctgccaaaaaataaataccaatttaaaggaacatcttaacttagcaaaaagctaggatcctcaagtcaatttgagttgtgcaatgcctcccattcgctcatgaattatgatcaaagtaattaggaccgcctgtagcagtaaagtacctgttctagtgactatacgattagaagaacaagctaagcaaacaaatctagtgtacattaaacttaacagtgcattcgaatttagcagaaaacaggggtcggatttctggttagcaatgctgagagctttcagaaatgaagtttgtagctgaagaatcaatagaaaatctgagcaatcgaataatctagaccatgcgtgcaagcaataagaaaaaatggcagcaacaatgggtgatcatatgatacagctagttcaagcgaccagagtttaagctattggttccttgcaagcacctgatgctaatcgcattccagctaagtaaccatgtgcgaatagctcaatgcaattgacaattcagcaaagcgaggcctgaccgcagccgcatcaagcaagcatcttaggtagccctgtgagaaggggaaggtgcaggaaacgtacaggcctcttcctgacggagctgaggttgcttgagcgggcggcaagcccattgcgtcgaccggacaacgacgcccccgcccggtccccggccgccgcagcagcagcgaacggaaggaacgccgtggactcactcggcctccacggcggccccgccgcgtccacctcccaggaaacctccatacaccacacgcgcaaccgcctcccagcacccaatcgccgccgcccccgcggagatcaaatgcccaccaccaccacctcagcccaatccacctggctcccggctcccggctcccactaggatcacaccaacacgctcctccaaataagcggcaccagcagcagcagctaagcggccgccggcggagtccagctgcatcctaggcggcggtcatcgcccaatgctcccccctcccccgatccgatctcctccgcccctgcccgctcccgctcccgagcctccgccgggagctcgggaccccggtgaattgggcgcgcggggttttggggagagcacgagaagagacccactcctctacctcgccggattggcgaggggataggctgcggcggcggcggaggcggaggcggaggcggaggaggaggaggaggagtggggaatttggagaggggggcggcgagtcccaatcccctcctccctgtttcgtctcttctctcttccctttccttgctcgtctccgtcacacctccctctcgcctctttttcgctcccttttccgtccagcgattagcttagtacttctatatatttttacgcgtcgagttttttttaattaatcaaagggggtgaaatgacaatgtgcacacagtggtaagcacagcagcaacggcctctaattatcgacgacgccgtcacgtgctccggcccacgctgctttgtcgtccagatggcacggtgaccgtctgatacgttctgatcttcgcgtcatgcggttgtacgtggaaaatgatgaaagaccaactcgtgtttcgttgtgtttttctttttgttaggaggttacacggtaatttcaaatttgttgaccacgttctgaaagtagtacatatttcgccctccggttgtatatggttcgttgctattttgaatggcatgtgaataccattagtgggaaaatatgtgaaatgcattattggtaaaaaaaaatggaaacaacgaaatagtataattgatgtgtgatttattgctattttacaaataaatgtgaacaattgacccaaaagatagaaacgtaggactttttgttgagatagatgtgttacaagacataaagtggttgagtgttcataggtagtcgctagagtacatcaaccctaaagtataaaaaaaccaacaaaaagtggacgcaagtgctagaaaatttgacgtgttaggctgtgttacatatccgacgtaatttcactctatagactagatagatagatacaatcttgtcagtgatattaatacgaaaacaacttaagtagaaatcaatatatttattttcttacaatagatgtgttatgaaacataaagtggattgagtgttcaagatagatagttgctaaaattcatcgacactatagctttaggatgtgtttatatcatcatatgatgctcaaattttaaattattcatgtcatctacaacatagagaaaccaacaagaagttaacgcaagtgctagaaaaattgatatattgggttgtgtgtgtatatattcgatgtgattgacccatcacatggaaagatagataaatgcaatttcgtcattggtaccaatatcaaaacaatgtaaaaatcagcacgttcaaggaacaaaagaaaaaaagagatatgtgttaggtcagcctttgtcagaattggttcgatattcagagttggtagatgtgaaaaggttgttggctttcaattttattccatactttgtatgaataaatcccaagaattgttgaaattaatgcatgacacaggatttgaatatataaccgcagaacatatactatggaaacttgaaaacatttttgttagaagtaaaaaaaatacacatctactcctttcgtttcatattgcaagttgtttgacttttttttctagtgaaactttcttaaatttgatcaagtttacagaaaaaattagcaatatctaaaatatcaaattagtttcattaaatctaatattgaatatattttgataatatgcttgttttgtgttgaaaatactattatatatttttctacaaacttgatcaaacttaaaaatgtttgactaggaaaagatcaaacgacttataatgtaaaatggagggagtagtttagatttaaataaacaatcatccaataagaagtttagatttaaataaacagccatccaataagaacaaactcaactttgattataggatgcaaaaactaaccaaatcgcaaagaaaaacactattctttttttccttatccactattcctcatttgggagcatcaggaaattcaaatttaaagaaaaaaaatcaatcacttttctcatttttttcttttagcgatcagcacaacacgggcgtgatgatccattgaatagagtaggaaaaaaattacaagtaccctataaggcagtagttaggaaagaaataaaaaaaacaccaccacacgcaccgacaacacatatacatactcaagtagaaggctagcattggatcggccaccgctaggctaacaaggaagctacagtcgggaccacccaaaaccaatcccaaacaaccaagcacctaactcaactctgatcacgcctttgggattgaggggggagggtgagaaagaataatggatccgctctccccctacagcccgcctactcatataaactagagcaccgccgcaagaaaacaacgcatatagaggaagcttgcactaactaccagaaggaagttttggcaagggacctccaaaatgacatctccaggaaaatgaacgacgatgagcaccaccgccgctgtccatccagatctcagggaaaccaagacagggttttcccccgacagcctgaccagaggtaaggggattgctcgacaaaaggtcaagcaataaactattcctatatgaaaagaatcaccgagctacataaaaaagaaacatacaatacataaaggtttacaaaaatacatacaaaaagttttcaaactcaaataaaaataaagtaaacccatatatatcaataaaactgcataaaaaagtaaatggcgtattgcacatcgcaacaatttagtgtacaatttttatgtgactggaatttcacaaaaaatcacacaattaaaatatagcaatattcttctcaattttatacttcctttgttttttaacgatggttagtttgaaaatgaactaaccaatgacaagtatcttacaaacgaagatgagtttatttttacaactctggggctgtctaatatcatcttagctatatgtatgatatttttctaagaactgttataccgttgtttgcaggtaccacctagatatggttttcactatacatttatgtgaaactactagcgtagttcttttataaacagttcgtggaactacttccgtggaaaagaaaagaaaaagctcgtgaaactacatggaatttagatctttgataaagcaaggacgccagtggatttgtgggatcagtgtttctccgagcacgggtttctgggcttgtcgcgacgcgacagcagctgacacgttgttttgaccgtcgacgatctcgccgaggagtcgaggagaatgtcgagaccaaaccgagtcacgggcacacgggtgcagttgcaccgtaaaaagctcctgtggagtccacgccgcgaagtcgcagcgcgccacccttctctcccactcccaatctcccatctccaatgccacgccaaaacgccgaccaacgtacggcaagtcagccacacggcgcatgtcaaccctccaaccaaccgggactagcacgctgccagttgccgcgtccgccggccgcgccggcggtgcccgtggacgctcgaggacccgggcgaccgtggaagccgtgacccgtgaacgcctctgcgcttcccctttttttctcaaacgctgaagcattcggcgacggggtcgaccggacgaggtcatcagctcaccggtctctagcccccgtccaggacgccaaatattgacctgacagctgacagcgatacgtccgtgtcgcgttcctctcgccgtgtccctgcaggaaaccgaacgggtcttgctccggaacgagggaagcgagagtgaggtttataaaaccatgcgattatcgtggttatcatatatggtaacattttcaatttttgaaacaatgatatacttcatgataaccatatggttttcgcgataaccgtagtagccacctaaccgcgggactaccacgatagagtggtggcgggcggagcggacgacgggcgagcgcggcagtggagcggcaacgggggatgagcgcggcggtggcggaccacatatccaagagcagcggggggaggggagaggccaccggctccgcgtggtgcacggcgaccccgaccgtaaccccgtccttgtcatgctcctccccttcgtcgacaagcctcccgaagtcgaggtccatctcggagagctcccctgtgctcgaccgccaccaccgccgtacccctccgggtggctgacgatgctaggagtggcaccaccggcaggagaaggggaagaggcaaaggaggagatggttccttggtcgccgtctgcctccctcgcgcgcaggacgggcgagctcggacgggttcaccggccgcctccccctccctcccaaaccacttcgcttgccacccgccgactactgccgcactcgcttgccgcccgcatccacgctcgcccatcgctgtgcccatcgtcgctccgccaccgcccacatccgcgctcgcccatcgtcgctccgcccgccgcccgcatcccgcctcgcccatcgtcgctccgcccgccgcccgtatccgcggtcgcccatcgtcgctccgcccgccgcccgtatccgcggtcgcccaagagaatgtacagctgacatgtgggctccacatacttttttaaattttttttattaactaggatgccacgtcagcgaaaccatccatatatattatcataggaccttaaatgaatggtttgtgtgagtttagagatacacatttctagtttgtggttaagggatctcaaaatctgttaagttaaggacctccggtgaacttattcccaaacagtttgataaaccctgctcgtcgcacacacacccaagccgtgccatccagcagtcaaccacaggctacggtccaatgcaccgcaacagcacgctttgatcgctgcaaacgttgatgtacgatgcggccaatgctagtagcttttaccatgcatacactatttagcccgttccatacaggacgtattagcaaggtgaacttaaccaactttatgtagccagccagcgcgcagcacagcatgcatcatcatcacaaaccctgtacaactgccaaaaagaaaaacttcacagcttcatgtcctttttcaccacctaagctgcttcacccccttcttcctgacgaccgcgtcgaggctgccgtcgaccaggctgatctggtccatcagcgaccgccggatgtggcccggcggcgtctcggtgatgccggcgaggtacacgtcggaggagaggtcgaacttgagtgtggccagaggggtgttgggcttcttgatcaggtcatcttccagcagaatctctgctaccctggacagtatgctgaatgccaccccaacaagaacccttgagtaggcctccacaatggcatgccccacgtcctgcgtagatatgtagtaagttcgttcaaaaggcaaaaaattcagcaagcagaaccaaaacatgttcagggatttcataaggtttcataatgcattttggacaaaggttacatgctctgcgcgagcacaaatggttgttatgtaatggcgaacttaccacattgtattggatctttacaacttctataaaagttggaggaaggctcgggaatctggatttcagaagctgcataagtgtttcaaccctttctatgcacatggacatcttatcgagttctgatgaactatccttcatgaaattccaggaatgccttcctggggatttcttgctcttttcctctgagatcctttgattccatgcaaaaactgcaccctccaaccggttcatagtctcgagcacggtatgctccgtttttaaactaagagagaggaaaatttcctctatgggaatgtactctgtggttatagcatggtacaagtcttcacccaagccagctctgccagactgcaaaagaatttaagaccatatattcagtacaatcatcaattaaagggagaaaagaagcatgaaattcacagagattgtcatgaagcacaaacaagttaacttgaaatggtacttgccttaggaagagcatccgtgacagctggaggaataggtatctgaagcaggacttcttcattgattgacatcgcagctttgaggatttgatgaaccagcttagcctgaaaaacaagcctatttctctgaaattgagacaaccctatatctggcacacgaggtgatgggagccaccacttcttcgtctgcctcagaccattctttttgccccggccattagctcggctaccactctccacataccaatactctgtgtctaccatcgagtccagcacttcctgcacatttgtggcatgcaggattaggagatacaaactatgacattgcataattaagtgaacgatggtttatgaacattttttgatttgtaaaataaaatgaaaagagatggcaactttgtcagatatgcatgttcatttactagagtgtaacataataataacaaaaacatacaattagcatggaatcaagcttctgaagggcaggaaggttcacattaacatctgaacgtgctttcggggtcataatctgcagtaaaagaaacattagacacagcacttagtgaaattacaggctttattcaatggatctttacctcaaacgtgcacccgtctgctccattttgttttgtaggaaccagctcaaccatgtaggttgtaggagaaagcaaccagtccatttccttccgccacctgacttttttctcttcacagagtggttccagcttccagagttctccaaatatagtggctggcataagaaatgatcattttggtcatgatgataggagtatggaacaaatacttcaaaaaaagaaaggaaagaaagatgatagttcacccaaaaaaattctacaatggacaatatcatagtttccaaacaaatggttaagcatacctgagagattaataatggcattggacaaagccagagcagcacaaacacctctagctcctcctgaagcatcatcaccaagcagtagcttcccaaacttctccttcatggtttcaatgtctgaagcactcaaggtatacgtgattggcttcttccctttgagaggaagtagatggacagcactgagtgtatccaactcgtaaagtgaatgctcctcttgctttctcagtggatggcattgtgaagagaacgaagagctagaaacatctttacttgaggagcaacttgagacttcatcatcaacggaatcagtggttacacacccatctgctcccgttgttgcactaaggccactatcatcgtcataagaggaactgttgataatacagctctcaaggccattgtacgtcatcacccctacatcatttggtattttcaacttattttggcaagattttaaatcattcagatgaccatgcgacataaatttaagaatttccagggagcctgatcttgcgataatgaaaacggtgaataaaattagttataccgccatattacatttaaaatgcacagacatggagatcagggtttggttcagtatactctaatgtgctgattcagaaatacattttaacacaaatatttcccaacgacccaatgattcttttgaagagcacttcacaaataactcaagaaaagtctagcaattatgcactgtacaccgtaatacactcaagatattgagaaaaaaaatgcctttagcatgacagtacgagtatgccattgcaaatgttctgatgttttgccaactccatgtgcttctgtctacagatagtacagtgtgccatctgtaacgcttaatgcctcactccaccgcaatgtacaagctgataattcattccgcttccatacaaactacgctagttcaagcttgctaccactaaaaacctagctcggataagcacaggtaggcacacattaaaccaggctaggttcttgtgacaccacagaacccacaaacagacactcccattgaaagccgatagcttcaaaacattctaagtggtcccttttactgctaaccaccactgagattcccagattcccctgtaagacaaagaaaaaaggttctttatctaccctacagaaaaaaactatgttacactttcacgagatgctcacatggcgcacacgatttatagttctaaattgtagttagtcgttaagtcatactccctactcctccccaacttcctgcctgctcacattgctcagtgctcaccgtctaaaaagcagggtaccactacgttacttctttatcctccaaagtcaatgaagccgcagatgtcgcacttgacccagctgaaagtagctagctggtccccgacacacgccgctccaaaaataaaaggtactagtactagtttctactgcttgtagtcttgtactcctgcactaccactccatgaacaaacacaccagaagctaacggatacaagagagagatcaaaaacgcaaacaaaagagtataaaaatatcactaggctggtaaaagtcaagactagtgtagaccggaagcagttggatagtggcgaggcgtgaatgcggccggcgccgcccggattcgcgtcagatcaagatagcagaggccatgactcgcttgctctctcttgtttgcttttttttactcgtagagttgccgcatctttcgtgactcccatttactcccacgttcctaacgtcagtggctgatggcactgtgctgcagcctccgtcggagaccaagcacatagcagggaggagaggagaggagaggagaggagaggagaggagggcccgtgaggcatgaacagtcgcgttggtcgtgactgctcagtgccaaatctactgctgctgacaccagcgctatcccacactccatgaccctatcacgttcacatctagtactagaagaaaatatatctctgaaaatttttgtttcatcacactactagtgctcctacttctttgctgtatggattttggttgtgcgggtaaaaaaattgtgaagaaaagttaggcagctccaaatcttggccagatttggagcagcaggttgcccggggcttgtagacatgctgcagctaccatcgatccaacaactaacaactactacagctagtagtacttacaaccaactcatgcacttgagaaatgaggaccgaaatgagcaaatacaccgtgaaatgagacaatgcggcagctgtacgcacatgaaccgggcaagaacaccacgaacagaaaaagaaatgtaaaaaaaaaatgaggcaggaaaacaaaaacgggggagattcgagatttcaggcttactgtcaggctcctggtccatgtcgatgctgaagtcctgcggccgccgccggcagcacgccagcgtcttcatcctcattcccctcctcggcagccggtaccggcagtagcagcagtaactgaaaaagagaaccccacagcgtcacgatctgaaacgagcaagttacgacgctggccaccgcatcccttgcaatgaatcccgtgcagccaaagctcaaggatagcgctcgtacaactacggcggcgactggacacgagcgcgcgcggcgagaagaaagatgagacgccgaaacggccaaaaaccccccaaatctttcttccccagttggtcccggtgaagaaaaaaaaagagaaaaggtgcgcgacacgaacgacgccaccagtccaccgctacacacggcaagcgagcaaaacgcaaagcacaaaacacgcgacttttcaggttccaccaccgctaataattagcccatcaaaaaccaaaccccaaacgtagcgagaggagaagctaataaaatccacgagcagatgcggggtaatgatgcgtaatccacggggacgggtttagattagatttgggtcggatcacgctaaccgctcccgtgttgtcctgacgggatttttatggtgcgggatgagcgtcccacctatacgggtttacggctgctgccactgcccactggcccggacgcccggtgacgctgaccggtcagggcagcgaggccgaggagggccgcgcggccgtgcagcgcagcgtccggagggaggatgaggtgtttgaactttgaattttgaactggacggcggtgtgggaggttgaggaaaggaacaggacggggacgtaggctttttgttggccgctttccccaaaggtactagctagctaggcaggcagctgaagtcatggtcatgaaacaaacggaaagccatgacctgatgaagggaaagattggcgtaataaagtgggcggagctgaaaagtttggggattgttcatgctatctttttttttctccctttcttttctttcccggcatcgctgatgcttcacctgcacctgcaccaccctcgcgaggacgccgtttaccagcctagcgacaaaactggcaacaaaactggcttctcgtctactagaccattcggtagctcgctcaccgacattgcaggaagaggaaaatcgcctggactgaacagtgactcgttgaggcagtagagccagaggaagatgagaagtgttgtaccttttgcgggcgtccaaagcgaagaaatcagcagccggagcttagtcctccgccatggatcttcggcgaaggtaagtgaggaggggctcgatcactgaggtagcaaaacgaggccaagagaaggcgaaggtaagtaaaacgagggatcgatcaacgaagtagcaaaacgaagccaagatagacggatgcatggatggagaaatggctgtgcttaccactgtactagtagtaggaggagcgtcggtgaccagaggacgtgtgtgtgtgtgagagagagagagagacctcagaggcactgcactgcactggaggtcgtatggagcaggtaagcgttggtgaaatgcaagggggcagaagaagggggagccggtggagtgtgtgtgaaatggaagctcgaactgtctgactctgtcgagtaataaatgcggcaccgaggaggaggagatgaagaacagaacgcaagcgaagtggcagaggagagtgaggaggaaagtcaggaaaagtagaggaagaggaggaatgcatgtggattcggataaaatactgtgccgctgcagcaacggctcgtggtggtggcatcggtccgtaccccttacgtgcatcacgatcccattcctcgcgtctgactttggtgcgttcgtctctcgcggacgcgcggccacacccacacccatcgcggctcgcctgcacctgcacgcacaggagcacacggcatccaaagctcctccgctgcaaccgcgcgcggtccgcgacgctggatcgatcggcaacaaccagcgtggggggcatatcgtcattatcccccgtcgcgactgcaacgtgacaacgtgtaaccggtgaaccgtgaaccacccggcttaattcttcgctcttttcacctggccgatcacttcacgacgcactttcgtggccttttcaggccagctttttgcgagggtcagaaatctcccaaatgcgacgtatacagatcgagatgagtatccgaggaaccaggggtgcataccgacgtgtacgcatgcatgtgacccgtgtccaggttttgctacggggcgagcacacggaggagtaatgctcacttttaggatcggaatcctgaatttctgcctggctggagattggagggatatagtcgtatacataaactaatgcatcgattaacaccgaggtattgcaaatagtactggaagtgaggctacagacaaacaatattgcaaatatcgctcgaacaagcaaacatgcacgcaaaactttgttccccctatcagagttttccattgtttaccaccaaactaccccaaatcccaccattcccggatcagctgaaagtactaataatgatctactaccactgatcggttaattgtgtttcgagtactcgattagactgggggaagatccggctatcatggcacatctctctaggattatttagattccaagtcgtcttgtactctatataaactgcccataaggttttgataataaatgtacaaattatactacgatcgaagcctcatgtgtatgtacaggttcgtaataataccatcctagctataaactacccatggagggttaataccaaaaaaaacatagagtaaatttcatagagctacatgtacattgatcaatcatatcacaaaattataacttttgtaatctcaatatgttatggatataaaatataaaatgtgtagttcttaattgataacttcatcactaaatatatagttttacgatatgatattttttaaatctgtagttctgggataaatttaacattaaacctgtagttttacgatacacatagtttgatcaaagtatatgtatttatgtgaatttttttctcaaacttatactgctagtagtaaattggattcaatatagtaaaagtattgaagttgtggcgttggattcaatatttaggcagcattgtggtatatcatttgagatcaatgccaccttgtgagtagtttataactttatataaagcacaaaaaagacttggattttaaacaatcatatagagatgtgatagaaattagagaaaatcccctgtgtacccttgaaagttcacctaatcccttctgtacccctgaattttgctcaatcccttacatacccctgaattttagtttggatctcttccatgccctttccgctagttgaccgttagttgaccgttaaattcttatgaaaaagtccattttgccctttggtataaagaagcatataaattaatagagtatattgttggagcatagaaatttgttatatgagactattatgtttatgagatagttatgcaccatattatttgcgataaatatacttttagatatgacataaaaaattaatacttatttattagttattaaaagattttttttagcatatgtgttctgaagtaataaacaaatctgttgtattactatgaaaacacatatgttacataaaagaacttttaataactaataataaataagtatcaactttttatatcatatgtaaaagtaaatttgtcacaaataatatggtgcatcacatactcataaatataatagtcccatccaataaatttttacattccaacaatatacttcattaatttattatgtttcttcatagcaaagggcaaaatggactttttcaaaagaatttaacggtcaactaacggtcaactagcggaaagggcatagaagggatccaaactaaaattcaggggtatgtaagggattgagcaaaattcaggggtatagaagggattaggtgaactttcatgggtacataggggattttctctagaaattaacactgtccacaatgaaaactgaatcatttctggcctgtcaactgacttttccaggtaggaggcttgcaatcatgtggagtagaagcggtgtaacgcaggccttgcttagttccaaatttttttcttcaaacttcaaactttttcatcacatcaaaactattttacacacgtaaacttccaacttttacatcacatcgttccaatttcaactaaactttaaattttagcgtgaactaaacacacccgtagttcatcagcaaaacgagaacatctagatagggaacgaagcccttgtttagttcccaattttttcttcaaacttccaacttttccatcacattaagactttcctacacatataaacttttaactttttttttaaacttttaattttagtcaaacttcctattttaacgtgaaactaaacacacccaaaccgagaaaaaatgctacagatctcatagcattgtgaatcactgtagagggtccagctagccaatgccacatctggaataaccagcgtcgtttagttctaaaatatttctttaaacttttaacttttccatcacattaaaatttttctacacacataaactttcaacttttccatcacattgttctaatttcaaccgaactttcaattttaacgtgaacttaacacaacccggatctaatcgacgacagggtgacaaagcagccgtacgactcagatttggccgcatcttctcctctgttacatgccgcgcctacgcatataattaacaacgtcataattaaacgatcacctcaggcatgaacgcttgaacgcgcttgcattctctgcaaccaacctctcgtaatgcgtccccaggtagataatgatacagccaaggtagccaatcaacacatacgcgtagcatctttgcactgcacggtcacatgcgaacgagtaccttcagacgcgagggcacgcgacgagatcgagcataaatgcatgtgtaatgcggcaacgtacgaacgattcgagtggcagctagtgcgcggtccaagccaccgctctggccgctcgcgcctagcttgtccggtactccggtatagctaagcgatcgaccacgcggagcggacacgccacacatgcaatacatgcaaacacatcgccgttttcccccatgcacggcgcagtcgccatcgggacgggagcagcaaggctctcgctccgtgcaacttagtactactgaattctcacttcctggctcgtacaactgcacgagacgccttccagctgaagcaacccgggcggctgggccgtggacaagcggaggtggggaagtggacctcgtcgtcgtcgtcgcaacgggaggatttggtgcatcgatcggcaggagcggggcgtgtctgtccgcgcgcggcgtcgtgcgtgccgggaccggagcctcaccgcgcgcgctgcgtacgatatagcgtggagttgggccggttttttatggtaactttcatggcgacatatgagaggaaacagagatcggatcggtgttgcgcggaaatccattaacgggacaggggacgggccaacggcgcacgtacgggcgttcacgatagtggctctagttggaagtgagtgacgagggcgtcaattattgtcggagatggagacttagagcttatgatctatctgtcccggatcgtctggttgcatatatggagaaggcaacaaatgttaatccaccggtcactgttactatgtcctccgaaatgaagcccggtgtcttccatggagtaggacaaggtcacgtacagacatcgagaggaatgcgtagcggctaagctgccaagtataactgcgtggccgcgtacaactgtaactcgagtgtcctgatctactcctctgccaggagaagccaaaaccagttattctgttaatttgacagcgttgcacacgctcgccatttgtagctctgcaccattcgtaggtacattcgctgtcgcgggtggttgttgcacgagttgctgtttaccttcggcctttggctttttggcagcgttgcacgctcgcctagccggccggctggccgaaccgactgatgcgcaggcaggacaacgtgctgaggaccacgggcgccaatgcaccgtgagtcgtcgcgcgggaggactcgtggattgatgaagcccggccaggtttttcatgtacctcgtcctcccggtacagtatatgggcataggggagaatgaagcctgcgcccctccaaccaggccagtgcaactgttcaaggaggaaaagtaggtgatttctctgcaggtaaatttgctcgttcgccttctccttttttaaaaaactttttttgaaaacttcgccttctcctccgttgcctcaaagtaattttggcgtttgacgttgaagcatactgaactgaatggtctgcgtttctccattagctttagcctttttagccgggtcggacgaaagaaaacggccaagcaaatttcattaagaccaggaagggagcttattagaaattacatgatatcaatagaacgctgtagagaggcgtggtccaacctcaaccaatcactagtaacctcaacatttcgcactacaggaactacttctttcaagaattaaacctcgttttgatttccctgaatagttaccatggcgtgcgaggtcgtcctttcgagcaccctagcatttcttttcttccgaatcagccaacataccaacatgaagaaggtggcaaaggattttcctatagctcgtctgaaaagcccaccttgctaccagccagaaggcaccaatcactcaaataatcctgccccagctctccaagaagttagaaagaaacaccgccttttgatagcctccaaaccctgttagtgtaggtcagtaggtgtaaaaagaaaaactgttactgtaagcacatgaaactaatagatatgcttgcgatattcttcatcaactgagatacacgagtgacaacttcgttgatgatatcaatttttttaggaggttataaactgtgaggcattttccctggattgctagccagacgaagaattcgacgtttgatggcactctcgtcttagccttgatctcaccttagcccgcccactgttgcagaaaacataataccgttcaacgattaattagaatgcaggtaatcgaagttatacgaaaatcttgtgtttgcagatatatgtatatattttataatactatgttcttctttgacttgaagattcagtccctgctctattttattaggcaaaatttgctacaggacaccgaaagattgtggcctttactgtgagacactaaaagatcgtgtatttgctcatggacactgtaaaaatatggtaattagctactggacactcctcccattattttattttttcagttgaaatggagagagaaagagttgtgtaagtaccaaaataccctttgacactgttcttcctctctctctcttcttttcttttccccttcttcctcgcggcggcccagatgtcgtcgtccaacacagactcctccgacgagtgcctcacgctgccaccgcaccgcacgaacagcatcctgacctttgtcagcctcaccatcgccatcgcgtcgtgcctcgtgccgctcatcagcaccggcgtctcaccgccagcgcggcgcacgcttggcagtgccgccgccgccgactgcgtcgttgccacgcgacgcctctggcgggacttccccttctccggcctcttctccctcgtcggtgcgctccttgcccttctcgttgacctctccgccttgtcccacctcaaacccatggccaccagcacgcggaggcgccgccgcccccaccaaccctatgttccaatccccaccacagaagtcccccatcttcaagctctccggcgagatgagccccaataagcgcgcgcacttctcaacggcttcttcgtcctcgccgatggcagtggcggcggggcggctcagtcgacggctcggccgcggcggggtggcggcggcggcaacgcatcgtggctcgcaactaggacggctcggccacgatggggtcaccatgggatggctcggccacggtgaggcggcggcggcgcatcgccgaggttcactgtcgacggcgacgacgcacgacggctcggccacggcggagctcggtggcggtgcaatgagaaagagagaagatgaagaagatgaacaaagaaagagaggaagaagatgaacagagaaagagagattgacaagtgggcccatgggtaaacttgtctttaatcaaagtttctctctccgtccggaaatgataaaataatgcggccggtgtccgccagctaattaccacatttttacagtgtccacgagcaaatacacgatctttgggtgtctcacagcaaaggccgcaatctttcggtgtcctgtagcaaattttgccattttatttctccgtccgtcccaaaatataaacatttctagaatagtgccaagtcaaactgttttaattttgactattaatagcgataaattaagaaagataaatcatgtaaatttaatgttactatcatagtatgcaagtctttttatttaaaatattttacttttgtagtcatttttggttaaagtagcatttcgaagaccgtgttaaggcctgtgtgtataggatacgctgcccattgaacctggtcggtcctccttgtgtgcagctcgatctcctggacgtcgtcccacggaactaggtactcactccgtactcaccaatcgctctatattggagggtgccacttgtatatcagtatatcacgttcctaacaattatcacgctgcctttgtgccactgtaaaccttggcctaactacatgactgaacaaggacggcattgagagctggatgccccgcgccgtttccaacgacaaacagtcgaccaatcagccttccaaaagttagttccgtgccgtttccaacgacaaaccttgttgattctcaaaacatgtttccaaatccctcgctgagttgtaacattttccacggtcgatcatgatgctcaagtgatttcattagccatttttttaaaaaaatatagtacaaacacaaccactcacaacgtgcgtacacttatcatctgaacgtacacacgcacatcattcacctataaacacatcttaaaaaaaactggtcagcatgtattgaggttgatagtcactatggacgcatcgctgtgtcttgagattgatgaagtcaccatgaacgcctcgctattgatggatatatttagaacttgaacccaggtaagctaaggctgcgttcgttacctcccgttcccaacttccctcactcgttttccgcgcgtacgcttttcaaactgctaaagggtgtttttttgcaaaaaaaaaataattaaaaaaatcatattaatccatttttgaaaaaatagcaaatacttaattaatcacttgttaatcgctgctccgttttccgtgccaggacaaccctcactcccaaaagcagcctaaatccaccataagaaaattaacccgttgagttacactcacttcgcctttcactagccactttaaccacaaaaccttttagaacagtttcagatccttgatgcacggataatatcagttgcatacacatggagctctatgctattaccgtccatcataaaataactttattttttatccatttcatatgccaacataaaactaaaaaaactaaaataccttattttatcaaatcgtaatgtaactatttctcactttatccactctcaatgtaactaaaataccttattttttatccactttcaatgtattttatcttctacttttatacaaactcggatgcaatggttgcttgaaaatgaactaattttatgatagatgggaggaaaaacatataatattactgtaggatagggagaggtaccaactaccaaacaatgccctcattaacctcctcctgcctcttccacaagaagactttgattggtcaccgggaaagttgcagcaccaaaagaaaatgcactgccaaagttaacaacatttcacaagggttgtcacctggatagcatctttggcttcgttccaacaactttctttggcgaggtttagtactctgggaactttaataatagatggcacaattaaaatttaaaaaaaccacaacccacaaaaaacacaatccatatttattccacgtatgaaacccaagccactgaagtgtgagggcgttgatgatacaacgacaagtttattttacgggggtttacaagacagaacttagttgctcttttgtttttattcactgaaaatacttacaaagtgaaagttcgtcggcaaaataaaagagcatcactgttcactcaaggcaagccatgaaaaaaagactcacgcatgacatcaggaaatgaactcacaattcagaaaacctataacaaacaacaaacttgtacagtttcgtgagcgacagtctttgcacttcgagaagatcaaggaccgatgcagatggcttttaaatatgctaccgagtgcaccagtaatctctacgtcgcgcctcaagttgccaaaactattatcacaattagcaagacaaccccgaagatcaccagaagaatgcagagctgcaaacaagatgatttatcaaggtagagaaatggttacaatagcaaaagcttaagaaatttgcactagcctgaacataccagtgatgaattcgatttctgagtcttggacgctttcgcgagttctgtctttgcctctttggttgctgctgcagaattctcaatgtttgtatcgatttcctctgtaataaaagatgtacgtgttaactaggaagcacaggaacaacacatgatatgtacagtgcaatgtaaaacttgccgattgtaactccttgaatatgcacaagtgtagcaagatccttaaatgcttcatgtacttcaccaatctgttgttgaatatcttgaatagcttgctccctttcctcaatgatagcttcattgaaaacaatttcattatccaattgcagcacctcttgcctgaagaaaaacatgataacttagcagagatgtaaggaaaagtgattctaccaaatcttgcatgtcgtattttatcaccatgaatatcaatcaaaataagatgcaactctttttcttcagggtcacatcaaagacagccttgtctagtcaaaattctctccatccttctctaatgtagaaaaggctctcagttcatgcgacaagcaatctgtgtgaagtaccaacatgtggaaggcaatctgtgtaaagtaccaacactgcaatttactgtaactgccacacaatctaggctcggtcaaaataatgcatggccacttggcctatgtattccagcagaagcatttgatctaacagattttaggtgcatgtactctcccaaaaagacatagaaagtgtgccaggtatataattcatgaggtgatatactgcccatgagataaatgacgtgccacgcgacttatgtaagttccatgcaccacagatgaaaactcagccacaggaagtcactaaaattgaatattttctgatgggatagaatgaaaaaacatgcgctatacgattaaagctgaccttccaccagtaagtactaaatcactagttgaaaaaataagcagaaaaagaagagctatgagaacactgacctctttgattctgcgagtagcgcatgctgttcaggaattttaccagaatccctggcttctataccacctgtagtatagctacatcatagtgaccaaaattctcaaagatattagaagataacccagtcaactctgcacatgaatacctttagttttaagataaaccatgtcactaaatgaggtcatcaggtaaactgcaagtaaaacggatggtcatgacactgacaaagagaaggcaatgtgtctttaaattagttaaattgtatgtttttacaatgcaaaataataagacccatctccatacttcaaaggaagagaagctaatggagcaataacataggcaaagttatatgacctattcaaagaaaaaaatgccaatataagctaggcagaatcctagaaggttgcagcataagcaaatgaaatggatcatgatgaacacagtaacaaactatgccaaaaagttgtgagaagtattacttggccaatggttcacatagggctagtttggtttgaaaccctatcaaaatactggtaccaaaccttgggtaaattttggcactaccaaatttttgatagcatagatttggctccactctattgatttggcaaaaattggctccaatccaaaatgctaacatgcactattcaaaactaccaaagaattggtagggcaaaaattggcaccaaaccaaaatggcccatacacaacagtatcagattattcaactttttttaagataatagaaatggtttacatctccagcctctgccgacaatcagattattcaaccaaactcttttatcaagcaatgagggcaaaggaattggttattactatactagtaactagcatggtggcccgtgcagattgcggctagcatctatattttatctcatataatagcatatatgttttctcaatttattattaaaatatattaaaatgacaacataattttaaattttgtactaactttacgaaactactaatgtgtaatattcatattgtattttatatacgtgttagttattaattatttttaatatcaaattttagttatttctaaattatattcctatatggactctagactcgtctttcaatatttcttatttttaattccaaattttcgttatctgtaaattgtatttctatatagactctacgctcttcttccaatattatttatttttaattctgattttttttttgtttctaattgtatttctatgtggtctctaaactcatctttcaatattctttaattttttatttcgaatttcagttacttctaaattgtatttttatacggattctaaactctacttttagttttattatgtttattccgaattttagttagttttaaattcctatatggactctaaactcatctttcaatattccttattttttttaattccgaatttctattatttcttaattgtatttctatatggactctatactcttcttctaaaattcttttttttttattccgaatttcagttatttctaaattgtatttctatatggactctagtctcctcttccaatattccttattttttaattccgaatttcaagtatttctaaattgtatttccatatggactctgtttttctttttctccgattaatatgagaatttctaggccgtgagagcgaacgtggaggctcctttttatattcctttttatagatagataaatagatagatttgttagaatccatgtggaagccactgataagtaacatgtgcatgtaaattaacttctacacatggccattcgtcggtatactattaaaaaccaatggcatatcatggcaggaaaatgaaacaatcaaacaatacagagaaaagtttgagatgaatcgaatgaaaagtgtacaagcattactttggctgagatgtctggggaacaactggcttatatgccatctccctttgaatcgcaagattttgaagttttccatactcctccatcgtcgtggcaaaatccttggcaagcttcatgtcagcaaccctcttgtctgcctgcacatgatacccagattcctaatcactatggtagctaagtaaactaagagcagaaagatgcatacatgatcacacatatagttggaaacagtcttgtccaagacaaattcactgggctaaaacaaagggtataaataaacagtaaattactactaacactagtatcggcgttcttgtctgcctcagcagctctcctgagcttctccttcgcatcctttgccaattgaagaatgttatgactagtcttctgcctgtggagaaatcaaccaatcagaacaccagagtgatggtaaacgacatgcctcgagggcatgagctaccaaccatcacaatttcgatcaattaacttgagctgagccaaaaaaataataataatcgcgagcatctagcattctaggacatgaaacgtgtagaggcaaacaacaattaaaggagtgaggagtgggggggagcgaggagagacagctggtcacgaagggcgggggtgtccttgggcgtcccgagcgagttgaggaggcggcggtaggaggccacggcggtggtgatctggaagacgagcgcgcgcgtggcgtcggggccccgcgccctcctgggcgcccgcaccgcgccggcctccagatccgcgaagctcatcgctgatcccccccggcctttctcctcgcgcgcgcgcgcgcgtccgatccccctcgcctcgttacgccgccgaggtgccccgcggctgcgcagggtacggcgccgggtagcgaaggtggtggtggtcctggtggaggcggcagagcggagaatacactagggtagagtcgccatcgccaccggccacgcacagttgcaggcaagagttctttattgttccatggatcaaagcgatgctacaggtggaggtggtggagtcgtggagatggccgcacagccacgaacggaacagtgtccgcccgcgggctcgatccgcggtcgcagtttgggcgtggtgcttggcatgaagccatcaactgcggaataagtccattttgcctccctcatctcttgcgcttgtgtaaataacatccccaaccggaaaaccgggtataatgcctccttcatctatgaaaaccagagcaaatcacctctctcggtggttttgctggcggtttcgtccgacgtgacgttgttgacccggttgacaagctgactcagcgtggtgggactcacatgtcagtgtgcagcgatgtcatcttggaccgacagcagttgaccaccggggagatcgacggccggcgacgcacgacggcgagccgacgaacggcggcgaggtaggagtagcgggaaacggatgaagaacgagtgagggacggggaactcggtggctggctcggatggtggagatgggcaactacggacgccagcgacgagaggacaagggcagcggcggaggcacggctccggcggttgtgggcggaagaggaatcggcgcgggaggtggacctggctgcggcggccgcggtcgctgcacgtgctcgaccccttcgcggctgcggccgtgcccgccgctaccgaggctccgttcggggaggccgccatcgccgtggtcggagcggcgacggaggaggcaacctcgacgctgatcgacgactccccgcagcaagcagctgccccaccatctcctcctcctcctcctcctctctttgccaactggatctggactccacgacgccaccgcagctgtccaccttgccaacgccactacacccggtgcaccacctcgtgccctcgtgagccacgcccatgccgctgcgtcgcctctgccatcaccactgtgcacccatccttccttctcttcgaagccactgcaataaaatcccccacaaaaaatccccaaacacatcatcctccccatttcacttaccattcaccgccgccaccatcgcctcccagtccccaccatcggcccgagcgccgccccgcgcgcggctattaggcccgcacaggcgctgcctccgcctccgccgaaaccgccgtcgccgccggtttcttcttcctccggggcgccgcctcctcgcgcgctcctttgactagccgtcttcatcaggccgtcgttatcgcgtcgtggccgccttcgggcgccaaccgcctctgcctcgccgccaccatcgcctccccagtccccaccatcggcccgagcgccaccccgcgcgcggccagtcggcccgcacgggcgccgcctccgcctccgccgaaaccgcctctgccttgccgcccttctcggtcgccgcgccggccgccatcgccgtcgccgcgccgactgccgccgtcgccacgcccatcgccgcccagcgccggctctgtctcagcatcgacaggaagagcagagagaagaatcgagaggagaagaaaacgagaagaagggaaaacgtgggtcccaccatttttttattattttctgtgtgagaatgacatgtgggtcccactacgctgagtcagcttgtcaaccgggtcaacaacgccacgtcggacgaaaccgccagcaaaaccactgagggaggtgatttgctctggtttgagagatgaaggagacgttatacccggttttccggttgggggatgttatttacacaagcacaagagatgagggacgcacaatggacttattccatcaacagccggtggaacacacggaaaagttttaggccggcctaatcgactgtatgtaagcagttgggcccatcatgatatctctcgggaataagttcaccggaggtccctcgaggtcccttaacctcgccctaaactcattcacaggagctcccttggcagtataggtggtttcgcgtacgtggcaccctagtcagaaaaataaataaataaagtacgtggggcccacatgtaagtgagagaaaacggtgcgggccccacatcccttctattttcccctttcttctcttctatcgtcttcttcgacgaccgagacgggtggggcaacggccggcgagagcggcggcggcggcggagggcgagtgtggccgcggcaggcgaagctggcaagagcgactgcgggcgaccgcggcgggaggtgggggcgggatccaggacgggctcctgctccgggaggggattcccgcggtgacggatatgtcgccgccggtggcggaggaatcaaaagggggtggcggtcgaatgccgagcgcccaaggtcgggcatgagcttgccggggatgctcatgaggtcgaagaacggcaggtcgccgggctatgggcagaacggagacgggcggcgcggcggcacgcgaagcggcgttggacggcggcgggcgagcggaaggcaagcgcgacgggctgtgggcagagcggacggcaagcgagcggacgagcatggcaggcggaggagggggccgcaacggcggaggtggccgaaggaggagcgtggcggcctactccgccggtcgcgtcgtcgttggcggcgagagcggcacacaaagtggacagagcgaacgagcacgtcgttcttgccgctggttcccgtcgccgccgtcgcactccttggaggagcccagcgtggtggcgtgccgcagcggcgggaacggacggagcggggggagatgaggccggcgggaggggggaaagaggcgacgcctcgccgccgctcacccgccgcgccccccgcgtcccccccccctctgctccgcccgcgcccggagacgccgctgctccgcctgctccggccatgcaccgcccacgctcggagccgccgcttgcccgccgtcgcgcttggccgctgcttgtcgccgccgcagccgcgctcgcccagacactgccgctccgcctgctctagcgtgctgacgccgcccctccacctactccagccgcgcgctcgcccatcgccgctcgccgccggcaaagagagaggagaggaaagagaagaggagagaaaagagaagaaaaataaactgcagctgacatgtgggcctcataattttaatattttttttgctgactaggatgccacgtaagcgaaaccacccacctatactgcgaagggacctcctgtgaacggtttgaatgagtttaggtgcgaacatttctggttttgtggttgagggacctaaaaaaattctcgctgttaagttgagggacctcatgtgaacttattccgcgtctggagtacctcgcttgggcctaggccctcggtctatggatggactgaaagaaagttcagtacatgccacagacggctatttggatttgaaaaaaaaaagagtccatatttcccccctttcgccggagcacttaaccttctatactatttattcgctcattttgcaccacgaactattgaaaatggctcaccttactccctaatgatatttgtcttcttcttttctctatatgtatgtcatattttgcaattaaatttgatgacattgatatacgcattataatttatatctcaacattttttgattttttttaattgttgtagaggttggaaacactcatactaatttaaatttcaagcaaatagttttgaaaaaaaatgaaactattttagaactctgataatggtgtcatttgtggctctgcaaaatataagcttaaaatatgactcgtataaagagaaacaaataagagaaatgaaagaaccatttttaatactctctccattccaaattataaggcctatttttttacatgatctccaatgatatactttggccattaatttatttcatgtcatgttcccaatgaatataaaattagcatcacgtgaaaatataataatataacatgcataatacttggtatcgatatagttagcatgattattagtcaaaaattaccaagtttaatttttttttagaaataagggtgcccaataatttggtatggagggagtagcttatagggtaaaatgagttcaaaatagttttggagtttaagtaatacaatgaaattgtttgggtgagtaaactggacttttctctttggatttttgtgcggtagagaaacaaattaacaaatgatgactacttgccgacccgttcactgtaattttaataattgcaagggtttttttttgttaaataacatggatattgaaattttaattatatgtcaaatatgtttgttaactttcaaattaaaatagatcatgttaaaataataatccatgtcaattactattcattaattattaatttcgatttttagaattaaatacaacactaaatcaaaatttattctatatgttttctgttgtttgtatgttttatttaatatttttaaaattttaattaataagtactccctaagaaagtcgtttaggacagtgacacgatcaccaaaacacaattttgacttcttatttctataaaaatatttattgaaaagtgatatatgtatacttttatgaaagtatttttcaagacaaatttattcatataatttttatattttcaaactcaacaacttgagaattactcatgatttatattcctaatgtttacttaaacattgtcctaaacgacttactttacgagtacggagggagtatttatttgtatttgtgttggagattcaatgtactatatttcataaattaataattctgaaatttaaaatttgtaaatatcgagttgtactcagtttagacttttggagatatattaatttttatttttggtttagtgtttccaagtttgtaattggtacatactcttattttatttgaacatgtttggtagaagttgaaaagagatgatttttttaattgcatgtattgtttaaaaaactctaaatacgatatacaatcatgattccagatacaacgactaaaattttcagttaacataggagtttcctcgggaatatctataggtatagttgtgggtgttttttttttctctgagcacccaattaatatggatataaatttttcaacaaccaaataaaacaatgtgatccaatgatccattgccgtcgtctaaagaatatcggatagagtactttatatggtacctgtatgtcaacctttgggatcagcagagtcgtgtgtcaaagatggggtgatcattgatgatttcgttttcaaaagttgtcaattttattcgggatcaaccgagacgttcgatgtgtcacggtctaatcccatcgtcttaataccacgattagattaccactacgaccaaaccaatcacaattggcgatcctctttcaactaaccccaaacagcagcagacacactgaaatccccgggttaatattgtttttttgatagcgtaatccaatatccccattgttagtaaggctctcaaccgtttctccgttcaaccccgaacctaaaatacgaggcggcggaccacggttttgctgatgtgataccgttgcttgttggcgcgagcagtccacgtcgggctgcctcttctgcttgcaaggctgacgggtgacggctgcatcgttatgcagtcaacgattgcaggctagaactcgagaggaacattttccattcttcctccatcgaaggctcgaactcgaagagtagtttaggaaaaaaaaaaaaacgccgccttgtttctccaatgtcattgtccgtccatttgacacatgcgacgcgtgacgatttgtttagcttttctgcctgttcgtaagccggtgacccatgcgaaatcgtttgcgcagcgcgcaaacgatcgtccccacgactcaagtggatcaactggcgattgggaaggcaacctagatcaacgaaccaaagagaagaaagcgagatgatggatgcgcgcatccagttggtggtggatgggcggcggagaccggagaccgaacgaaacggccagattcggatggatccgtctgccccgacgaggagaatgccgcttccaccacgccccaacgctgggccacacgcgcgcgcccaccaggccaccacccaagccgagtccacgcatcgcacgcgacaacagaaggtgaccgaccagagggcggcccaaacatccgggaagagatccattcctcacggcccccgccacaacatcgccgtcgcctcgccgtctgccgctgccacccagcgaacgcaaagacgaaaacgtcaaggaaaagggggggggggggggggggggaactctgcgaaagaaagaaagcgattcgtcgcaatcctcactcccctcccggtctttctcattcgtagttctcctttttgcccgcacaagcagcagtgcagcagcagcatacgcagtcacaaacaccggttattattggtcgatgcgtgtttcctgttcgtttgggtggcctgatgccctgatctgacgatgggtgacacgacttgggcttaaacaatggccgcaccattaggtagtgtctggtgcaggggcgaacgcgattagccatgatgtagcgtgattctttccttgcaggcttcctttcctagccaatcagccaccttctcccaaaccagtacaggcgctatccggttgaccaaaccagcctaccaacccgtcaagtcatcgacacagggatcagatcgatcaggagggcctctcatctttgccaattccatctttcttctgttctcctttcctcttcctcgttcttcttcttcttctagtatccgtgcataaaactgctaaacaattaccactattgtattgaccaatgagtcgacggggccatgtggtttggttttgtttagcatcccgtctctctcctcctctgtttccatcatcatcatcatccagaggccaccaaccctcctcgattattcagagcagccaattagtcttggcgtcttgacgtgttcggagaatttcctctcatttatatgcagtagttagacatgctctggagaagcaaagcgaggtaggaagagggatttggtcgaattttacgtacttagccgtgggcgaggcgtttacagggttgcttcggctcggggtgggttgggttgggttgggttcgatggagaagtggagcagggggctctcctgccgggccgccatctgcggcatcgtcgtcctgctctgcgccaccgcgttctcctgctccctcgccgccgaattccgcaaagtcaaggtcaggctcgcttgctcttgcgctctccgacgccggcaatggtggcgggcgggtcggtctcactcacgcccttggatctggatcatgtctgtgtgtgtgcgcaggagaaggacatgaagctggacggtagcctctgctccctgcccaagagctccgccttcgaattgggcgtcgcggccatcgcgttcctctccgtggcgcagctggtgggcaccacggcggcggcgaccaccatgtgcgccgcgtccaagcgcagcaagtcgtccaccaccaggcgccgcgcggcgtccgtcgccatcctcgtcctctcatggtacgccctatagtacggccatggctgccaaacaaagaattaatgcgtgatttctgcgagcgtggatcgctgaatcgccgcccgcggcgcgcgcgccggatgtacgcagggtgagcttcgcgctggccgtcgtcctgctggcgaccgcggcgagcatgaaccacgggcagcggtacggccggggctggatggacggcgactgctacgtcgccaggaacggcgtgttcggcggggccgccgcgctggtcgtcgtcacggcgctcctcatcctcggcctcacctccaccaccaaatcatcctcatgcgccacctcggcagcatccgccacaacgacaatccgtctcgacgcggcggccacggacgccgagcaggcgagcgggcgatcgaagcagtgacccgccggcctggccggggcggaacacgcggggcgggacgggccaaccggaggagaggcgggtggacggtgctccgcgctgttcgtcccgcaaaggccaagcggcgtgggggcaatctccgcttgctggcaaaggccaacggctggtgatgggtgggggcgggtataccggtgggttagaagatattttagctggacaaaggtagtacatagcattactgacaaaattactgaccaagaggtccaagaccgtgcaaaatgtaaatgaaaccagatcaaacagatccacgcaaagaaagtaaaggttgtacatgaattaattacagcatcttaagacatagccgagttcgaacatggtgattggtggatgtggcagagtcgaatgtgagtcgtacgatttagtcgtatgtatagcaggattctatttttttttagctcgcctatgccagattttcgtgatggttttattgtatttatatatttgttttttagataacaggagatgtattactgtagtaatatttatatatacctagcatgtgtttcttgattaggtcctcatgttttagcatgttcacttgtgctggcaaaggctggctctgtcctctatacattatctagtctgtaacagtctaacagacagcatgatgggaatgcatatgaacaattctttttggctctgtagactgtaaattccttttttttttcttcttcttctggtgagaagacaaaaatgacacggggataatatgtgatggcccccgagtttatcagtcgcattgttgcaatgagaatgacaagcacgttggctcataagcagtcgcattatcctatgtttctatcttttcatagggcaatctccagtttttgaactagaagtatcatggaaattgcagagttataatgatacgcgccgctggtccaacaatacggactattgggagagcaatgcaacgcagaaaaatgcaaacgtcatattagaactatccgtacacagtacactttatcaggtcataaagctaaaaagggtatgcaacggtgaaggggatttttaagccgttgcgggcaagttcgatgttttctttcaggttggcaacagcaaacatgttggcctggtgtgccgaaggtggaagaaacaaggcaataggattctgcatgtgctgtcattcatacgggcttgcatctggtcgtgtgttctttgttttcttgcacacaaaaattcgtggaaaatgtatactattcggtagctctattatagcatgtacaatagcatactataagccagttataaacacatatcaagaagataaaagaagagagagaaaagcagcgggctacagatttatgtgtatgataggggggaggtagtatatttattagctattaaattaactataaatgatttggagttagtagtattaaacttgctcttaccgcaccaactgttgactggtttcacagagagatacattcagttatgttgatattgattaatatcattatgagctgggataagttcatatcatccccctcaactaccacatttatctaaaagaatccattttactctaaaaccgacataattccttcccgaactcataaaactgtttaatttacacccctcatacaaactagactggttttttctatgcggcgtttacgtgaacagcatgtggtgtcgatgtcagcataaaaataaactagtagcttcacatgtgacttcttccccctccccactctccactatgtctcacgcccttactccaacgtatagatcaatgaccaaatgggccgtctggcctaggcacaaccgggcccgggccgagattagtcgagccggcagactcgacctacacatcgggctgccccgggtctatccacttgctgcaccatctgcctatgcacgacccaataagacttggatggtgtcgagctagcccaaagccacgaaagtccattgcactcttccttggataaaagactattttgcttccctcatatctttgggccgtctcttatatggttggaataaatctatttttcatccctcatctgtttgggtcatttcttgtatggctgaataaatctattttgtctctctcatctatttaactccctgatcgttggactgggccaatgccgtatcggcccatcgtgtcgagacagaggcccaggcatggcgcaaaggttgggtcatgccgacacgggatgggcctaataagtcaagcaatcatcgtgccacgtaggcgtcacattaactagaaatcgctttcaatattgtcgaggaatttaatttgtacccgttttaaaagttgagggacactccggttttatggttgagtggtgtgaataaaactcgacctatagttgagggacctaaagtgaattttatttcaaagcgtacaagaacctgaaccttgcacgttagctcaaaacctggatgtgcataaatcctggccccatcctaagggggtggctacctggcgactggtcgcgcctgccccatcgcgcgcgaccaccccccactcctcttagtatctatactatacaactagtagttactagtattactattactattacactactactattagtactagtattatttctataaaaaatatatttttatatgtatatattgttgatgtataaaaaatatacacatatacaaactttgtatacaatatgtacaaactttgtatacgtacgtattaaaaaataaaaaaaaacaaaaaaacataacgtatacaaactttgtatacgtgcgtatataaactttatatacgtacgtatataaactagtttgtatacatgaatacaaaaagtttgtatacgtatatgttaaaaaaaaccgaaaagagaaaaaaggaaaaaaaaagggggggggaaacaaaaaaaaccaaaacagaaagagaaccccaaaataacggaaaaaccaaaatagacagagaaacaaaaaaccggaaaaaaccaaacagaaagagaaaccaaaaaaaaccggagaaaaccaaacagaaagagaaacggaaaaaaagaagggcgcgcgcaactagccgccaattagcgttttcgccatcctaatgcataagcgggacattatactaaaatgtttggccaatacagttgaatgggcctcaataccgactcattcaatcgagtccttaataaagtgggtgcaatctcagatcggacccattcctcgttggaaaaagttcaatctgactccttcgatataggtcggatatgataaattcatatccttcaaccacaaaaccatatataatgtaaagcaaggtcgacaacgaatgcctgcatgagttcttggataaggcgaacgaaggcggtggcaccaccatggaggcatggagtacccagagcatatcgtgttttgctacagtcccaccgccgtcctatggaagaagtcgtcgtaccactgccgagaaggggataaacatagataggaaagtaaggagatagaggggatgacatgtgagccccattgtattttttttaaaaaaaaaattacgtgatgactaggctgccacatggatgccacgtcagtgaaaccaccaactatattgttaagggagtcattttgcatggtttaaatagttgaagaaatcactatacctagtttgcggttgaggggtaggaataagtcttgactatctttgagggactcaattaaacattttccttcctccctccagatacgctcaggacccatctcttaacttcgataggctggtgctctggcctcttcatggaccacaaaatggaataagttcaatttgactcccttaaaagtgacacgaatctaatccgtgaccctgaccctgaaccacaaaaccagatatcttgactccctaaactgttaaaaccggttcaatttgactccctcagcggttttggagggcggtttcgctgacgtggcgcatacatggcagtattgacctggttttacttccatgtggcgctgatgtggcactataatttgtaaaaaattgtgggacccaattgtcattcacattaaaaaaaaattgtgggaccctttacatgtggggcccacgtgtcatcctctctccccttccctcttttttcctccctctctcccttctctctccttctctccccacgccggcatcatggagcccagcctagccggtccttgcacgcgtagctccagaagagagcgcagcagaagtactgcgccgagcaggtgacgtgaagcagcactgccacgacgagcatgtgcgcgcggtcgtgcggccgcggcgcgcagtctttgcagtacaccttgtggatctcctcgcggtcgtcgctggtgccggggcgccaccggaggagcagcacgaggtggtggaagatcttggcgtgctggactgctagtacaggcacatgatggtgaagagcgcgttgaggaactggttgatcacctccgtccacttctttccgctgctcatcgttgggatggcggagtcaagcatgccggtcatgagcatgaacacactggtggagaaaccatctttggtcggtcgaccagattttacaatagtcccgattgtattaaaaaccgggactaaaaatatctttagtcccggtttaaaagctacagagtactttttcaatctttagtaccggttggtgttaccaaccgggactaaagatctatttgtagtcccggttaataacaccaaccaggaaaaaagatcgccatacgctttactctcagttgctgttaccaaccgggactaaagatatatttatagtcctggtggtaaaaccaaccgggagtaaagatcgacgcggagatcggagaggtgtgtgcgatcggatcgaggccggtacctcctcctctcctttaactcctctcctcaaccttatctcctcctctcatctttaacttctctcctcaactttatctcctcctctcatccttatctctattcctctccttctcctctcctccttctcctctcctcctccctattggcaggggcgcgagggcggcgggtcgcggagggccggccggtgcggcggcagggcgcggtgggccggccggcgcggcggcggcgcggcgcgcggtgaggcggcgcggtggcggctggtggtggggcgcggagggccggcgcggtggctgcgcgcggcgaggcagcgctttctcccctttttttttgaagaatctgagattgttgtgtgatgtatttgattggatctgagattgttgtgtgatgtatttgatttgtgtgtgatgtgaatatgtgatgaattttgtagaagttgtgatgtaatttttttttaagattttgtgatgtatttgagtatttgagatgatcgatttgtggatttggaggcaatttgagaatgattgatttgagattttggggacgggatagagtgaaatcaatatatttaaaaataatgaagaaaagaaaataataaaaaggaaccggaaagagcaaccggattagcatctttagtctaaagatgggtttttacccccggttttttcacccgggactaaagatagcgatctttagtcccggattcgtacttccggttcgaaaaccggtactataggggggttacgaaccgggagtaataaccctttctccaccagtgacagcaacagtaggccagcagcccagcggcgacgaacgccaaccaaatgaccatggcaaagttcccttcacctttccatgctcctccatggttgacatgcttttgcgtacatggtgcgatgcagatggcggtgacggcggcgttgaacggactcgggctggcactgcaaatcccgacaatatacaccttcgtcgccgactccttcgacggcacgagcaggggtgtggtgtttgggttgctcatggtggcgggaatggtcggcacgatcgaggcagagtggcgcaacgcggcgtccctcgccagggcgttgtacatcggcatcgctgtcccatggtgctgtgttgcctcgtctactcgttcctgtactgagagagaagggagaaagaggggaggaagaagagagagaggatggcatgtggagcccatatgtcagtgggccccacaatttttatgggtgtgaatgacaaacgggtcccacatatatttttttaattcaaatgccacctaagcgtcatgtcaaccccacaaattaggttagcaccgccacgtcagcgccacgtcagcgaaaccgtcctccaaaaccgccaagagagtcaaattgcaccgatttcaatagttcatggtcgagatatccagttttgcggtttagggtcatggattagatttggtcacttttaagggagtcaaagtggacttattccccacaaaattcctgtgcccgacgtgttcggccggctgatgcagaggagagcccaggtttctgaaacttgcgatttcggcccataatcctgacgaaaactctcgtgataaaaaaacgtagcatatcgtatcatcgtagtttttctggtgagtgactcacgatgtctgaaattctgaatggaaaaggatacgggaaaaaggagagatgttggctgcttttttcgcataaaatattgaaacggatacgtacccggttcctggatctaagccacaatctcacaagaatcaaattcagtgaccacccccacacaacacatcggcaacgagatttttatatcagagaaatactcccatggctatctgtgtaaagattttgtgaggttgcatgcacacgtaagtcctcggcaaaagctgaagccaaaaaaaaaaaagatcctggttatctccgttttctgatgatctgtagccgtctttttggtgcgttttgatatccccaatccgcgactgtcagacggacacacaaaaatgcgctgtaaagcagatcgagccacgtatcaaccggtggtcgctagtggagcctgaggccgtagttcgtgatgactctgatctcaaatcatgagaagcctttatatgtcattaatttgtgtccccccccccccctctctaaagcgacgcgcatccagctgcgattttgtttctggctacaaatcgcgtttctttttaagtgaaagcacaagtgcagctcgatcgaccaaagcgatcgatttagcaatgtactccttaagtgaacgaattaaaaaaaaaggactgacacattagcttggatctttgcttcatgacagtatctccctcgagcaattgcatggatgcacatatcttaaactaagcgatctgaggactgtgctgtggtggcctgtgatcggaaaaaggataacaatgacagctgaatgggaaaatttttaatatggtacgcatcgagatttctgaattaaaaacaagtgaaagaaaagttgatggcgaatgcatgggtccggccttacaatcaagtccaccctgacaactggcttagtgtagcagctagcatatatatatcctcacctttgcctccgctaaaataatgaaagactcgattgcttaaccaggcagagagtgctcgtggggcaaaaagatcagaacaaaggatgatctgtcaccaaaggccctagtgtatactactgttcgcgtttgatcgggctttgagactgaccagcagctgtatcccaatctagccagattgccactaaataatagagagtgatgcaaagctactagcacggtccgcgatcgctgctccttttcgccttttggatatcattatggagtaaaatacaacgtaaggaagcacccaaggaagcagggaagcatagtagcatcagtgatgagcacgtagcttagctagctgttttagcttattagcttagcttgggggaaggcgatgtggagagagcaaccggtaggacaaaggagtacaactgtaggatcagtgcacggcgaagcgtccacccgagtgacaggggagcaaggcccgaaaaggcgaccagaaaggcagaggaaaaggagagggaggaggatcccgggcggggacggaaagcgaaagcgacggcacggcacacgcatacacatattagcatgtagcgggggtgtaagattaacggtatcgggacggccgaccaggtgcaacagccccagcagcaaccaacatcacggctatcaagttgcggcacaataccagagctgtttcagcttcccgtctcagcttttgtggttttcctctggcgctaatcacatcagctccctctgattctctctcgtcatgcgcgtgccttgaacctgcccggtttaagagttcggctaatcctgcctgcgcgcgtcgctgtctcggcctctcgccgtcccgtcgcgttccgggttttcgcctctcgcctcgcgcgcgtgcggtcgcggtcgccctctggcgcgcgaggcgaccgcggtcgccctctggcgcgcaagcgcaagtggcgcgtgctcgcgtggggccacggaacgcgcgcgcggcgccggataacggcagaggcgacgcggaaaagtcagagtcagccgtcgcgctcgcgtttcatcgacgacggaagatgtggaggggggaatagggaatcaacagcaaactaaaagcgcacgcgcgcgtcattggttgaaactggaaaaacccaacgagattacgagagaaactacctcaccggaatgctacgataggccgttgcggggtccttgaccgagccggtggtgtgcgtgggcgtggcgtcgtttcctctggtgatgagatgagatggaaagagcttttcgctgcaacagaaaactgacagatggatggaaccacgcgtcgttttggttcgcccatgctgcgtgctttacatagccagttggtcatatatcctttgctcatctcatggcaaaagttacacgtgcactattgaggaataatggaaattggaaaatcgactgtgcaaacagagctgcacacttttcaaagcaaaatttctaaagagagattccatccagaataagttaatttagtactaaatcacatccggtttctgagacggagcaagtaatctagaaattttggcgagagctagacgtaccctctttgattatgctgacgtttatgttcacaaacacaacaagctatacctattttaacgcttggtggaacagttcttttactagtacaagtcggcatggatttctttctatgagtcaattacgtgaaccgggactacgaatcgccctcttgcatgtacggtcggcattgaacttgactcctcaaaaactacgcgcgtcaattttcctgataggttcgatacaggtttccaatatatcgacggataaggtctctttaaacggttttaatgacagcggtgaaacataaccagtttgttgttatatatagtcggccactcggacagcagcttgtcttggccgtggaaaaccaagtcaactaccgcgaccttcctcatgcaaatgcgtatgtatgacttggatgagaggagaggccgagactgataggactgagaccgagccaagtacgcaacgaaacaagcaagcagcttagctatcgccatatgtgcatgtatagtcggcattgcccctgcccggtcggtagggacgacaaaatcatggttcgcctatgacaacgcgaggacgtacggtacggtgtagattgacctcgttcgttcgctcgctagtccagagctagcggtccagggggccactacctgtcaacaatcggtgctcgtatgaatagccgagcagtatcgcgaccgttatacaagcagcagcacatggatggtcgatcgatctgcgggtggcaggcgaggcgtaccgatcgaccgtacacgcacttacctggtcaggtgcatgatcgagaattcgagatacgcaacgcacggttggatcgattgatacgcagaatccgcgggtgttgatcgattggcgataggatcagcgtctggaattcgtgtgaatcatgcacggtggggcgcgcgagttgcgtgccctgattggggcgtgtagggtagcgcgtgcatgcgcgcgtacatgcgaggatgggagcgagatatatatccagatatgtgtggcggagccgatcggggtgcgggacccccccgtgccgggtgccctgggtacctgcccgctggctacgcgagggaccaggcaaccactcgcgcgcgtcgcatccgcatgcgccccaatcaaccagactctccttctctccttcttctgtttgctcgcgcgtcgtaggacccggctaggcagtacgtacgcctctcagcctctggctgaatggctggctaagatccgccacttctagcgtgatcgaatgcgcgatccatctcccctgcctcgcgcctcgtcgtgttgctgcgtacgatgtgtgccacagtgcggccagactagataccggacagagaatttgaggtcctgtggctaagctgtgcgtgtcaggggagggagtccgtcgtacgcgtgcatgcacggttctgcacggaacggaacgtcacgcgagggagcggctatttttgtagctggaccaacctgttatttgttgcgtacgtacctcatgcatacacatgcatgcagccatgcatgctgcggcagtttcacaatgtcaatatgtttgtactgtacggtgtatctagatcggccggttagctgatgatctgataatccggaacgtatagctaaaaaaaaaaaccccaaaaaaatacattagattgggtacggcgaggaaacaggatagatgcctatgtgataaaaagcgaaggatatccttccaatattgagccagcaaacaacgaacagtcgggacaaaagttacatggatgatatgtgccatactttctgcaatttatctatgcagaaaataagattgtgagcgtacgtacatagtgcgatgtgccgatgtagacatgaatggaagtcgctgtagtgcttgtacacacccaactaaagtttagcgaaacaaagattctagatatccaggagacctttcgatcgtcttatgcagacaaataatgcaacggcactaactgacactcgtaacgacctgcttcttccaacatcaacatgtacctttccatggtatattgtgatattgtctacatagacctgtacgaagacctggtcccagcagagaccgggtgtaaatgaggtgacgggggacgtaaaattcagagtctagtgccgacttgcaggggcaatttaaccactgcaatttcctttgatgaaaattctaatgcgtgtgggcgagttttaaattgaaacaaataagagtacaatgtactgcaggaactaaccggcctcttgtcacaagtgcaacaaatgggtcgccgtttaaagttacttagaacaatgctacttacactatgctgggctctcgagggaggttgggctgaaaaaaaaatccctgtcatgaacgtttaccaaactactaaatttcgtgcataagtttatgtataattttatttaaaagaatcaagtaaatctattttgacacctataataattagtattcaattcattatttgctaatcacttactccctccgtctcattttaagtgcaatcatgagtttccgtgtccaactttgatagtccgttttatttgaatttttttataattaatatttttgtagttatgagatgataaaacatgaataatactttattcgtgacttatgtttttaatttttttttaaaaaaaattaaataagatggacgatctaatttaaacgtggaaaatcataactgcacttaaaatgggacggatggagtatttgattttacgtgccactaaaattcaagtcaaactgtctccagaactaaacctaagttttggatgtgatagctttgtgggattgaaatctttagtcttttgattagagtaaatgtcataattgtggcccttgctgcctctctatcttttaaacttttttagtttgcaagatgcatgagaaaatcatgcttcggacaatgagttttcctctaacttagtggaaataaggatttcggcacaccgggtgacatgaaagtattattggtatgctatatcaatataaaacaacacactattgttgttcgttaaaaaaatattgtcgatatcaacaactactcaacacgtcaaatattgtgagagttactgacaaatatcggtttagtgtcaacagatattagatctttagatcttatacccataagtatgcatcgtctcattttaaccagtagatttgctccggtccaataaaaggtatctcgaagtatcatacctcatggtaccaaaaaaattattttcaattgttgaatctaaccatgcttatcctgtctagctaatccaacgatcggaaacgatttggtaccgtgaggtaccggtaccttaaaataattttgctggaccagaacaaatctcttcaaacagacacatagttcctcaatcgtttccttgccgaatgccgagtagtaccgacgtattcattcaagcatgcgctcgctgttggaagacacgtacggcgatctcaaatactagtatttcctgaccagcacgacgatctcaaatactagtattccaccggccagctagcgtcgggtggccgctgcgcgcccgcctgccggccacgtcgcgggcgccgactcgtccaccagcatcaccagccttatcgatcagtgccgtccccgggccccctccgccgccggagtgacattgtcgctgccacgcctgccggctcgtgtttgattgatcgggctattttattgctcgcccagctggacacgcgcgacatcgcacgcaaaacgcctggcctattgcacgcgcacactgctacgcttcgactccatcatatcccgtcggtggacgatcgatctgcgtgttacccaagttagcagcgagcaaatcgtccgtgctgatcgaaacgtgccaaaacggggaaggctaactgtactacgcagtcgcatgtgggcgcgcggggcggctcgaccgcgcgcggagcggcgccgcacggcacggaacggaagagatcgatcggtcaaggagcggtagagctgcgaccgggcgcgcggatatgcacatatgaacatccgcgcaatcattgaagacacgtatgtcctgcggccgccgtaacgtggcccgcgcgtcgatccggcgccacaacgacgcctccgcgagctccggcccccgatatttcctttagctagagcccgctttgctgggtgccgtgggctagctcactgcgaccacagacgcgcgcgcctcccggcccgggaccgcttccgcgctacgtctactacgacgacgtactatcgtgcatcccctatcagatcagatgcgtggttccacctctcgtcgaccaggacaaacaccgaagcgcgccgcatcgtctcatcaggaggtgatcgaaacgcgcacaggtgtcccgcgaccgcacgaagcggccaggagccattgatgatcccacggcggttgtcgtggagtaaggacggcgccgagacgaccggtcgcgcgcgcgccgcggcggttgattggctctgggcggctatgatgaggctatttgactatcaacggctctcgtccgcgccctgcacaccgcaggcaagagcccggacaaagcacgcattttggcgcccttgaggccttgactccaaagttagatcgcaacgtagccgccccgcgctcgcatgtgattcgtgaccgccgcgcccgcgcgcgcgccgcggtggggtgctacgtgcaaattccctgcccgcgtgccctggacggcgccgtgccagcaccgtgcggctctctcgcacgtagttccgcccatcaacctgcaaaccttgcaggctttctagcggcatccgccgccgtgcatatcctgagacgaaatggcactgcatgtatgtgcaactaggataccaccacggacagtttggtcccccaagaatctatccgaatcgcacactcatgctgtgcttcagccacttcccgatccaaattgggctcctgcccccgtgggacctgaccaccgggtctcatattcctcatagataaacttgtttagatacaaagatggactggtagctaccacactacaggacggaacagaatgcataattcacaaagggtagccccccatgcatgtacgtaattgtcctttgcctgcgagaaaatatcctgtcaaatcgcactataacattttaatattgtgcattgcatattcgtttcacagaatgctactactactgatcaaaggccaagtttcatttgttctcttacgtgaagcatgagtttgtacacacatacatgtagcctgttggtagcttgggccggtacactgataatgccgtcataattgaacgagaacaagcgatcaatatcctcccctgccggcagcatggcgcgttgcaaacgtctagaaggcaatggcctcatctgcgatgaccgatgaagaaataggttgagtatacgtttataacgcagctcattcgaaagttgtgtgagattcagattcagcatcacaactgttagactatattacgaaatgcctgccactccttttacattatattgtatactaatatagagcctcttttacatttgctcatagcgatgaggatacgttggattaagaatgaacgcaaatgatggttccgtgccacttgtccttttgcttgcatggagtcaggaagagattaggaacaaccgaacaagagggtattttcaatggtccacgtgtccagaaaccatggcagatattttgttactaatagtttccacagtagactactactacacctcctcagcgtccttccctaatacacatatactagtagtattcagtttcgagttgaaagattttttgacgggatgagttgaacgactgaatttggatttgatgaataagagatgaattgaagcacaccctcacagctgtcccatcacatgcaaaggtcaacctgtagatctgaatgcacatgcctttgaatttctgattaagatgttaacctactactagaactgctaccatccgatctttttttgcccgaatcaaaaaagagagaaaagagaaaaaaatatgcttttatttttctcagaagaaaaaaagaggggtagagctgcatgcgcacgaccatttcgcgacggactaacggtttgttcaacacctgtcattcccatcatgagcaggttaagcatttcggcacgcattcctactttgcaacctgctttagctagccgcggtcagtgataccggcaaaaattcccaagtgatgtttacttcgaaaaaatagattattcacgcatcaataaatcataaaatgagtatcttacgatggactcaggaacaatcggtagatgtgtttaccgacaaaaagaaaaaaaaaacaccgccgcaccggacaccaagtaattaagcagaacagtgttcaggccagtatgatggctggttggggatgatcagaggaagcggccaaaggagagcagcattataggagcaggagcaggagcaggagcagcagcagctgctgccggggcagtacgtagtacgtacgagagcgcgtacagtagctgatggtgtggaaacagggcggaaagggagaggtgagctggagaaagggatgattctctcgcgcgctggccagaagagaagagaggcccatttagctatcactgtattggttaaccggtttaaccgatcagttgattaatccggctctctcgcccgcacgcctttttccctttatttccgtattgattgcgcaattattcggcagcgtctatctgtctctctcgcgcgcggaggcacccagctcggctattctagcgcgtagtggtggtgctagctactagtagtagtagatttttgggcagcaagcggccgcagaaaaggagagcgaaacggaggagaaaccgggaaactcagctcgcggccaatctataaatagctgccacccctctcgcctttccctccacaccccccccaacaacaccaccgcccatttccctttctcttcctcttcttcttccttctcctcctactcctctgcgattgacaaagataagtgaagtgagcaggcgccaatgggtgcttttcttctgttcgtgtgcgtgctcgcgcctttcttgcttgtctgcgccgtccgcggccgccgccggcaggcgggctcgtcggaagcggcggcgtgcggcctgccgctgccgccggggtcgatggggtggccgtacgtcggggagacgttccagctgtactcgtccaagaaccccaacgtgttcttcaacaagaagcggaacaagtacggtcccatcttcaagacgcacatcctgggatgcccctgcgtgatggtgtccagcccggaggcggcgcggttcgtgctggtgacgcaggcgcacctcttcaagcccaccttcccggcgagcaaggagcggatgctgggtccccaggccatcttcttccagcagggcgactaccacgcccacctccgccgcatcgtctcccgcgccttctcccccgagtccatccgcgcctccgtcccggccatcgaggccatcgcgctccgctccctccactcctgggacggccagttcgtcaacaccttccaagagatgaagactgtgagttcttactgcctaactcctcttcccactctgctttgctctgctctactctgctttgctgatcgatccgatgtgtttgttgttgatggcatatacaacagtacgcgctgaatgtggcattgctgtccatcttcggggaggaggagatgcgctacatcgaggagctgaagcagtgctacctgacgctggagaaggggtacaactcgatgccggtgaacctgccgggcaccctgttccacaaggccatgaaggcccggaagaggctgggcgccattgtggcccacatcatctctgcccggcgcgagcggcagcgggggaacgacctgctagggtcgttcgtggacggccgcgaggccctcaccgacgcccagatcgccgacaacgtcatcggcgtcatcttcgccgcccgcgacaccaccgccagcgtcctcacctggatggtcaagttcctcggcgaccaccccgccgtcctcaaggccgtcaccgtaagttcgcctcctcatatctcatagtatatcaaagtccttgatggtgaggctgaccgcgggtgccatggatggaacaggaagagcagctgcagattgccaaggagaaagaggcgtcgggcgagccgctgtcatgggcggacacgcggcggatgaagatgacgagccgggtcatccaggagacgatgagggtggcgtccatcctctccttcaccttcagggaggccgtggaggacgtggaataccaaggtgagcagcagagcagagctgtccggtggcagcctgtccgtccctttcgagacagcctcgcgcttctcttccgctgcgagtgaactggaccgaatggggcagactggttccttaactgaaatagactaactcgatcagtcgtcccagaatctaacctcgttcgatcgtctgctctgtgcagggtacctgatccccaagggctggaaagtgctacctctgttccgcaacatccaccacaaccccgaccacttcccctgcccggaaaagttcgacccgtcccggttcgaggtcagcatcacgaacccactcttccgtgtttttgttcccttccctccctttcctttcccggtgcggccgacttcctagccaagtcggtccgcggtttgcgagcagtggccggtatgggttttcctgaccccgcgtccgtcccgtcactgttgcaggtggcgcccaagcccaacacgttcatgccgttcgggaacgggacccactcgtgcccgggcaacgagctcgccaagctggagatgctcgtgctcttccaccacctcgcaaccaagtacaggtggtccacgtccaagtccgagagcggcgtccagttcggccccttcgcgctgccgctcaacggcctccccatgagcttcacccgcaagaacaccgagcaggagtgaaaaccgaacagggagacaaaaagaagaagaagaatactagcatcagctaagctggggaaagctggcaaaaccaacatcaacggcgggcagcggcgccacgcagcgcgcgcgagtccattttcgcggcggtcaccgtccggggggacacctgttggcgccgcagtgggagcgggagaccgaacggtggattccgtattagcacggatcatcagagtccttgtacagattcttcagctaggaccacggttggcaatcgagaggaggagcagaggagttgatgaaaaaaaccaaacactacgtagacatctgagctagggagcgccacaaagaagtggcccttaattgtaaaaccaaccattttttatccttttttgcttagttttttttttggccaacaactataggagaagagtagagaagagaagagaaattggggagaaaatacagggaggatgaagaggccctgattgggatgtaagctaggttgcccgcctgaaagcaggctggcatgcagatgcagctataggtcgaataatcgaggcgagcgatgatggacggatggatcgattcatcgatcgccagagtcaaaagggaagaacgtcgtgatcccccgcgggctaagccaggccacgggagagcgactcctctgtaccgtttcgtccaactcaagagaaaatgaccttcttgagaaaagtattgaattgtccctatacacgcgcacacaggaattgctacccagcaccctatattgcagttgagcaagcgattttttcgatcacttcttgtgtgtaagcatgcatgcatgcttccaataaactaattctaatctgcagcgtgatccataaaaatatcggttggactttgggataggatactacccgagtcaaactgatggaatgatgcatattgtggatgatgagttcttttaaaactaaactaaaactatctgttgcctctctagcactggaagggctagctctttgtaccacgtctgtgatccatctccaatcttaaggttctagaagctaactttggatgccaatggcatgttcttgattctttttataaaaaaaatgaatatggaattaggagatgattgaaatcaaattgttactcttggtctaaatgttggctccaaaacaacccaaatgcactatgatggtttaacccttcaaaatatttcattttgttaaaaacaaccataatggccaacaactactaagattgtagcgggtaatgttgctcccattgggcacggtggcattggtcaagcgtcgatgaattaggccaaggtcgcgtggaacaacaccctagggaattgaaacaacaaatataatgttggcatcacatagaattcaaataaaatgtggttaatggagttatgaaattcttccatcgtgtattcgtgttgctatacaatcatatacgcatgggagattggatgagaacaggataagtatttttcacctcggacgaacacatgcaatttggttcccttgatagaagttccagttgatttatagaggtatcaaaaatggtttacacttaaactcacctacttatccgtttaccatgttagctgccaaggggtgaaatcaagtttggtacgtcagctcatcgtatttccgtatcttagcccatattttctttcggagttagaaagtatggatagagtcaataatctatcactcagtaactcgtatcctatttcatatttgttgtttagataatagtaccacatatctatttttctctctaatatcatccccacgtttcaggtcgggtgagtggatgggtatgtggaaaatacttatcctgttttcatccaatctcccatgcttatatgaactaacttaatcaagttgaaactgagcttttctagtgaaacaacgatgaagtttggatgataccataattctatccctatcgattggattagactcccctaactttgtgcagtttacagttgtgacactgatatgacaatgtgagaggatctgtttccctatcgattcgcccaccgaatctcaaattaaacatggtgttgacaattttcttgggatgaactttggaagcgccgtagtacgtacagcggtacagggttggtgaccgagtcgagtgattgacttttggagatggaaacaagcatacttaaaaaaaaacagagagacgcttaaaaaaacagaggtgcaaagagccaaagagagatgcagaggaacagagcgaaagcgaagtttccaggaaagcggaggccgaagtctcctctccctctaatggcgagacagatggaaccctatcctctgtgccaattattcagccagccgggcaggcaggcaagcggtcacgagcccggcattattcagttgcccatcgatggaattcatggatggacaccgatgtggtattggtgagtgaactgagcccaatcagtgacaggcaggaggcagctgcgtgcgatagcgcgcgcccggccgggtcggcttgcaatttggcctttgcctgcccatttttttagtcactgcgtgcgcgcgcgcgtccaccgatgatccatctggaaatgtgccttttactacaagtatgtttcggactttcagtgttcgtgtgcgcgtcatgcatgcagggggggaggagacgctgctgctgattggccgctagattctctgctcttctgctactggctaatataatctcttcctttcctagccattcccgggctgacacgtcagcactggtcagccaggagaggcttgacgagctccccgttttgcctaatcccatgtgctagtgccgtactagagactagagttacgggttgtcaaccgtgtgcatgcacttgcaatatagtatcacccatggttgatggttgcatgtgctgaaaggtaagagcttagtgttaatgcagtacttctggtataatactgtgaaaaaaatgggtgtacacaccggagaaaacgagtgggaggaagaatgtgacaagaaagtgaaaattgcagcgaacgtattggttaaatggaggacaaatggctacaccgggtgtttttaggaacacgctatttagttatgttgttgtcgcatgagagttacatatagtaattttatagatggcagcgcatgagtagttgctaaccatgtttcttacgtggcgtgaagtttgtgtcataggatggaagtgaacctttccacttccacacatcttgcattaattattgatcctaccatatggttcgttcctttttattaagtgacatagaggcagcctctttgagatgtactttgcggaaggtaaattatgtatataatgttattcacattcacagtagaaaagtgcacaccaacaaaaggaaaagaaaagttaatgcccgaaggtaatgtaaagagacaatccattatatgccactgagtttgtcatagctctacgatttgccactgactttgtcacgttctataatataccatcgacttttacttaacttctatgatttaccatcgccgtccagttagtctccgttagtactgtacaattttgtccaaatgaccaaaatacccctgggataaaacttccaaaatgtggacaaaaattctgaaataccatattataaacataagattgtaaacattcaaaatttgtccaaaaacttaaagtctgacatttcagattttttatccaaaatttgaaagtttttgtctcaggggtattttggtcatttggatgaaagtgtacagtactaacggagactaaccggatggcggtggtaaatcgtagaagttaagcaaaaatcgatggcatattatagaacgtgataaagtcagtggcaaattgtagacctatgacaaactcagtggcatacaatggattatctctaatgtaaatgaagaagaagcgattacagcgcctatcttaggcgtgctactccactagctagctaatgaataaaaatgtagaggcagtattctctctctggtttggttttagttgatatacatatactcatccattgtagtacctctctctgtttgggcacggtttggccattgatttttcacataataaacagggtacaaagacaataaggtggcaaaatactttatagtacgaatgtagcagcatatttttttatacactaaacaaagttgtaacttaactaattgttgatgaaattctatgtggtttgatttattttgtttttaaaaagcatgcatgccatacataagagtactgcctccatgcatagatatttatatgcaacattttatttggaaaaagtcttcaacatcacactttaaccattggtttttgatagaaaatattagtaacatttataaaaaatactttgaaatatgaatctatttcactaaaagtatttgtagtttgactaatcgttgacaagatccataaagtttgaccttttctctaaacgaaatgtatcttaaaaaagtttacagcgggagcacctgaaatttttacattttggtcctttttgaaaacttattttacaaataaacccctgggaaaacttaaaccggaaatggtcctttttggggcgccagagtggctggcgccgtaccccaacatggtggtgccacccacactggcgccgtgcccgtgccaccgtggcactagggctgtcgtggaggtgctgactggtcagaatatgggcgccagccacactggcgccacccctcataccacggcgccaacatggctggcgcgccccttctctgtgggccgaccccttaaaccctgtgggtcccaccacctttctcctccccactcccattttcgcccaagcaccagcccgagctgagcagcagcagctctccccctctctctccccctcacctccccacatcaaatccactccatttgaactcatttttcgcaggattttttgtggaaattgaagagaaaggtagactcctccattcccccctcttttttttcgtttttattggttgaatttgtagatcgaagggtaaccctagaaccccttttatgcccaaatttgtgatttttagcatttgttcttgggatttacttgttgtagtgctacatgtttgcaatgtacgcattggtgtcacgatttttttaaccatatatgtggtaatgttaatttttggattgtttggttggatggatggatgaaaaattagggttgaggcatgaaagtaattttaatttgatggacttgatgctatagcctataggttaaacttttaacaattaattatatgaaggggagaaaattttggttgcattatagaaattgattatagttaattagaactaggttgggttgtatgacggagtatttgtaatatttcgatgtataatgcactagtaaacttgttgatagttgtaggtggattaaatattttttttggagtagtagctttgggacaaattaagttatgcattggttataatatgtcggtttggactacgtttataaatgaatatttaatttttgttgcaaagttacatttgattttttggtgtagatggatagacttgttcgtgtttactacggtggtagagtggtggaaccttatgttggtgcacatgttgagttttaggatatgtcattgaagaccattttgtttcccacccacccaactctagatgaactaaggtcacgagtgaaagaagttcttggatggaccgaggataatgtggagattcgtttttatgggagatacgatgttggtcaagggcataagtatatattaaatgtcataggtcagttggaatgggaagtttactttgatttggtaaaagagtctcagtttagatctctagaggtgtttgcatcaaagttggtacgtaccgtagaaaatttgaatctaaacaaatctccttcttatcattacgttgagaagaattttgtgacatattcttctcatcgtgaagggggtgcaagtaagactgagttggtacgagaagacttggagggggaaggagataagaagagacctttgcttggaaatgatttaggggaggcaggatcatcaaagagacattgcggtactgatgatatggatgcagcgagggagatgaaaagggagttagtacaaaaggggcttgatctaagtgaacatttgtcggagagtgttcattggttgtcgtacggaggcaaccctgaatacccgacggaagtagcaggccaatatgtgaatccagatgattactttgatgtcgaattgagtggtggtcacgattctgtctcagtagaagtcaatagagaggaggttgacgaggaggcaagtgttgagcaatatgatgttgaatttgctgaagactctgatgatgaccgtccattacgggggcatgccgtgacgggcaggacagagaatcctggatggcgtgcacaagtggagcagctgtttggcattccactgaacattgagcaggggcaagggggcaagaagaagcagaatggaatacccctgtcttggctgagtcagaacttctcacatcttgacgacgacgctgagccatggcgtgttgagtgttatgcccgtgcatacatcttgcacttgttgggaggggttctgtttcctgatgctggaggtgacattgcttcggtgatatggattcctttggtcaccaaccttggtgatctgggccattttagttggggctcagcagtgttggcgtggacatatagacagctctgtgaggcctgttgtcgtcaggcacgatcatccaacatgagtggttgtgtgctattgattcagctgtggatgtggttaagactaccggttggaaggcctaagtggaggcaaagctttactccttgcccctacaatgagccagacatggagaagacagtggcctacctttttgagagtactaccactgcacatgctcaccgggatgtggcatacaagcatcatgtcaatgagatggactgcttacagcctcaacatgtaaatacttccaatatcacttctagttagacatttacttctttaattgatatactaaccaacgacatctcttcaacttttgcagattgagtggttaccatacatacaaatgaggcttcaagcctgaccctgaactcgatgtgcaatcgagactctgactacttcatgtaccagtgcccattgatttgtttttgggcagttgagtaccaccttccgcaccgtgtcatgcgaaagttcgggaagaaacaagactggccggttgaggacatctcaactagagttgaattacacaagtaaatatttcttatctttgtttgctttcattgtcaatgttcaattttgtaccatttaacccttgtcgatgctcactattgtttcatcaccttccacttgtctaggtatgacagggtgagaacaaagaaggtgaaagactgggggctagagcataacagatacattgatgaatggaggacagccggaaggaacgacaggtacatcgagactatacaccaaaatcatcttttctcagagtaccttcgttggctgcataggacatatagattgttcctccaccctacatggacggaagccgacatagaggatgaccgcgactccgatgagggccggaatccctatgatgtccggactagagttggatatcaaatggagcacgccccacttagagacagagtcataagttttcttgcatttgtcaaaagttatttccatttgcaccctagaccctaacatatatcttctcacgctttcagtcgagagagctcctcaagagtgtgaatgaaatggggcatgccctccaagctccgaggggtggtgaggacacggagaacacactccgtagaggtaaaatttatttagcactttgcattacttgagttatgcctaacaaacttcttttttttttgaaatgcagaaagttcgtcaaaggtgccggaaacttgcagcaagattaggttgcaggtcggttggattggacgacgtgtaccaaccgcggagactaccaccaccactacctcaatccgcacgtccaagtaccgctcgacactccatcaggatagaagagcgtgaagaagttggtggctcgtcgtcgtcacgcattccgcaagggaggggaaaggagaaggcgccggctccacctagcgacgacgatgacgacgacgaggaggaggatgagaactacgtcgcactagacgctgaggagatagacatgtcgcagcttcccgacgcgcctcaggggacacaatccacgcaatacaacttgcgatccactcggacagcgaaaaagaggtaaaatgagcttaccattctcaaatgttatttgatttccctcattttgtttttaatatgttttaaacattggattttcaaatgtaggtacactccgggctcgcaagcaattcggcgctaacggaagaagtgatttgtatgaagttaatctatttgttggtagtatgacatatgtggtgtactatgtgatataaaatgtgatggactatgtgaggactatgtgatgaacttttgacattgtttcatgtgtggaatataggatggacttttggcattgtttgatgtgtcgaatatgtgatggacttttggcattgtttgatgtgtggaatatgtgatggacttttggcattgtttgatgtgtggaatatgtgatggactatgtgaggactatatgatggacttttggcattgtgatttgtgcaattggaacttgttttagtctgtatgaatctgtgaattatgatttgaattgcgaactgtgaattggtacatttgtgcaatatagatcttcaatttgcagggaggcagagggcgacgccagctaccctgacgccgtggtccatgagggcggcgccagccgaggcccggaggcagaagggtttcggtgggggaggaggacggcaccagccaccctggcgccgtggtccatgaggcgacgccagccgaggcccggaggcagaagggtttcgggcgggggaggagggcggcgccagccaccctagcgccacagtctgggggagggggcgccagccgttgcccggaggcagaatagacttggcgaaaattttggggggggagaaagttggtggggcccgcagaggaggggcgcgatggctggcgcgtggtatgaggggcggcgccagtgtggctggcgcccccattctgcccagtcagcacctccatgacagccctagtgccacggtggcacgggcacagcgccagtgtggctggcgctgctatgttgggatacgacaccagccactctggcgccccaaaaaggaccatttccagtttaagttttcctaggggtctatttgtaaaataagttttcaaaaaggaccaaaatataaaaatttcaggagggagcacttcctttttctttttcaaagcatagtcccttcggtgtcattttttgcttggaaattaagcggggcaaggttcagggtttcccaaaccactggggccggggttaccgtgccccggcggtaaacacggttaccgcgcggtaaccgtggtaaccgtgaaaaaccgtacgaaacagtgcaaaatttatcaaaaattcaaattattttttaaatttatttgaatttaaggaggttactgcggtatttatattactgtacccccgcgataagcccggtaaccgcggtagccgcgcggttaccggcggtaaatcgaacactggcaagattgaccttactaaggttggaggggtcatcgtaccccgatagtaagcttggtaaccttgcagttatgcaatgaataatggaaaaactagctaggtaatatttaccagaagtttcaaaattccatttcattttctttttatagcatctcggtcgtaagcttggttaccgatcaaaggaaaccctaggtgaggaacgtccctctcgtaagtcgtaaggatgaggtaattgtaagattgtttgtcagcctcaactttagtgtactagcagtccgtaagctgttttgtcagctcatgacatgatgttttgtcgtgtcatctggtacgttgacattacaagtttcatcaggaacgtaacaaaattcaatgggctgcgtggtcaagatggaagggttaggtctcacggagctaagtcagctagcatgaatatatcattcatataattaaactatgagttgactatagcatgaattaatatagcccaaacttttctaggggagttctgaaatctgaagtatgatagagttgacgagttcccgtttctctgtatgattgccgggtgtatgcaattaacgtggcctctaaaatacagcttccaactatatgtattttgaaaagaactatgtattttattccacagtagtactctctctgtttcaaaatgtttgacaccgttgactttttagcacatgtttgaccgttcgtcttattcaaaaaaatttgtgaaatatgtaaaactatatgtatacatgaaagtatatttatcaatgaatcaaatgatatgaaaagaataaataattacataaattttttgaataagacgaatggtcaaacacatactaaaaagtcaatggtgttaaacattttgaaacgaaggaagtataatactattgtttacatacatattgacactttaaaatatatttaggccccaggaatactggcgccgctgggaagcctccattgatacctaataatttgcttatatattagccgttctcctctgcatatgctacttatttatatatccacgtttggtttttcagcaagcaaagtctacaagaggcacaactctatctgcatagtgttacacattatacaattgttcattattgtggcttccctgcttctgaaagaaactggaccagtcttcatcagtgtcttcagatcgatctcattgccattgaaaattgataatatgtgtactatattttttagatgaaaagcccagtaccgtcctcatgcatgcatgcatggactcgatccttggcttgtgcttgctgtgcgacgatttccacttgttttttttatggctagtaggtgcagttgtggagaatacgcaacctacacgtagtaccgtttttttttattggagcatccatcagagtcaaacttaaatgcttatttgacctgaatttattttcggcttgaattttgtgttttattaatgtgctatatataggtcaactgtacttatgcaaacctgatggcatgagctgatgagcccccttttttctttcaaaacttctgaagaaaatgacacgcggagctatcttctgaacttttcagttgaaaaactgaagctcgtttttctgcaaaactccgaaacaatgatttgttatttcataacaatagtgataagcagtcttcgctcaggactttcaggttaattaacatactacaaccggtcaacttgaacagcattgcaagtagcactgtggtacgagtgccacctttttattagaacagtacaaatgctgactaatttagcttttataattgttcagagttctaggggcaaataattgaccggtgatttgacttgtcattgaaaatactcccttcgtctcattttaagtgtacctatgagttttcgtgtccaactttaattatccgtcttatttcaatttttttatgattagtatttttattgttattagatgataaaacatgaataatactttatgtatgacttattatttttttaaaaaaaatttcaaacaagataaatgattaaagttggacacgtaaactcatagttgtgtttgaaatgggagagggagtaacaagggagtagtttacaatattacatatagaccccgttcttttctccaacaagagttggatgaagattaagattttcgtgtggcacgtttttcaaactgctaaatggtgtgtttcgtacaaaaactttctatatgaaagttgttctaaaatatcatattaatctattttttcaagtttataataattaaaactcaatcaatcatacgttaataacacctcgttttgcataaaaaacttaatttttattttcatctttatcttcgggagaaaagaacaccaccacactgatacggagcatactgttagccaataagctggacacgtggcacccgtcattaagttgctcccaccaggtaacttcctacgtcccttgtttggatcaccctggcgtcaactgttcgttttgtcaaaccatggcgtcaaataggtgcagtccgaaattcttttggctatgtcaccactagggagtaaattcttagcactttggagtcaaccctcctagctataataacaggagggaaaaattttctttttccacgcaaataaaaagatttatgtataatttgtctttaaaatagatgtagatgaaagtctgggcattgctaaggaaaaattatacgatagtaactaaacgtgaggtacaaagtaaatttgctttgtagttaaactttttgccttcacgtactttacacaatcacatcttgccattatggaaaaataccaatgattcaaatgttaaaaacaatacaggtagtttgataaaaaaaacaaaaacaattgagatgttgtacgtggattcatgctagagacgaagggaacgatttgcaccataaatgaatgatcaaagggttgaaaataattaaagtgatgtgtggctttatgagagaaacgataattatcattaactatactcagtgatgaataactttataattaactttataggattcaaaatgtaactttacacttttgaaacttttcaactcatgttttaaaactttacaaaattgtacgatagtaactaaactttataggagaaaagactatttatttattgttttatagtagaaaattattaaacaacaattaatcgagatacactgtttgaacgaatttacatgtacgtacatgatttatccctggtacaacacacgatggaataacattgtttgttacattatgggttatgtaagctgttgacccacaggattatatcggaactaatctcatatataatacaatcatgtcacatgtgttagagagtactctctccgtcccataaaaactaacctattggatgtgacacattctagtactacgaatctggacatatctttatccatatttattatattagaatatgtcacattcagtcctagctagattcatttcgtttgggacggagggagtaaggacgactattatgttgtagacccatcatataattgtaattgtgattgatgacatgattcaggattctgacaatatattggaaacaacgaagtggatggagtctgttcctacccatggaacaaaaagtaaaggaacaaagggtagggtgtggttaatgggtgatcgatcccatccccctatacgctctctcccccatttctcctccttttcttctttttctactacaccataatttttttaaaaaataaaaaaacaaagttggaaaaacgattatgtatagaaatactatataattttttttgaatttaaatttaaattttaaaccggtatgtaaacttttgacttataaactttgagtctataaactaatatttgaattcaaattcaaatttgaatcgggtatgtaaacttttgacttataaacttttggtatataaactttagttgtatagaaatactatataaaaaaatatttgaattcaaattcaaatttgaatcggatataattcaaattcaaatttgaatcgggtatgtaaacttttgacttataaactttggctctataaactttagatgtatagaaatactatatattaaaaaataattgaattcaaattcaaatttgaatcggatatataaacttttgattgtaaactttagatctctaaactttgtgtataaactttagatgtgtaaacttgaggtgtataaacttttaagtgcataaatttactaaaataggaaagtaatacggtgaaaaaaaaaaaacaggtgtcgggagggagggggatccgtcctagcgatcgattcgcgtgcaacgtgagcgtgacctagcgcacggggcacatgcacggtagcaattccttttggcatggcccatcataggcgaggggtagatttcaagcccattgtctcattatccctatccgttgctgcatatccaggaggtttgggccattcaccgtgaataaagtgcaataagttcactttaggtcctttaatatattgctaagtatgaaattcatccctaacctaaaatactattaatttacaaaaccggatcactcaaggtcctacacaatattatgcccagttttagctgatgtgacatgctgagtaagtgatgtgaaatctggcgccgcgacacacgaaggcatgggaggtctacttaatttcagtgcaggttctaaatcttgatgaggttcggatgtgctagttaatttaatcttgcaactaataaggatgacagaaagaattgaaccaatcaaccgatacagatctgcatcgatccaatggttaaaacgtacatcgactggaagtccaatgcaggtagatttgagtgtatatcgattaaataaccgatacatctgataactaaatcttaaaataatgataactcattggctacagcctcgatgaaacattgcaaaaaaaaagtcctattggcttagggcatctccaacagagggccaaataggttcctaaaaattattttttaggattttggttaaaactaggcctctaacagattgtcaatcacggttctaaaatttacccactcctaaaatcggtgccaatctcatcagaatttgggaagctgtacgccctcccaatcccaccaatcgcgcccattttttttaccgtccgcgccattttttttccgcccgcctcctttttcttctcgctccttcctcgcgtcgttttctttctcgcgagaaacagcgcccacgccgccaggctagggttatgggagctcctcgcgctagctccgtcccgatcgccgtcggctgcctatccaggtcaccgccagccggccgtccaggtcaccgccggccggccgtccaggtcaccgccggccggccgtccaggtcaccgccggccgtccgtccagggctccgccggccgcttatccgggggattgccggcctgccagccgtccatccaggggcagcgtcgccggccgtccgtccaaggcaccaccacctcgccgtcgaccgtccatccaggttgccccgacgcaacgtgtgctgttactcattcacttcaaggtattttcagagaaacaactttattcttttcaagcttgaagttcctgtactgatttccccacaccgtcaatcccccacatagccatctagttcacagggatatctcccaattttttgatggagatgcaaagctcctcccttaaattgtttaccaaatcactgccacatacctcaattgtagtacttatcttctgaataatgcaataaaaaactgttgtcctgtcctcttcaaatgatttccaatggatcaggcatcggtaaatgaggtatgcggcaataggccttgcaatagagaaacccagatcttcagatatgcacttgatcaacaactcatggatattcagaaaaatatagaagaaaatgttgaggcacaacacctgaacgaattgtgatactgcttgaaaagaagttcagaattactaagcatcatacctgttgctgcttctcagcttcaggatcattcaggccagtcagttgagaattgttctcctagattgaaattaacttttgttaaataaggaactcattttacgaatatactgatcaaatataatttgaggattatactaacatggatgtcacaaaagttactggcctataccaattgttaattcaacagtgtttgcttgcgtttgtgttcagtcagatgcattcttcttcaggttgtatagcaccctaaattaactaaacaatgagcttctatatgtgcagggttttgtttgcttgcagcagtatttgatgaccttttcttagataatttaagtgtttgatgacctgaccagtcagctgctcattggctagatattgctattagcttctagtatcttctgaccttaactttttagccttttgtaatggattcagtgaacatgtctgaattaaattgcagagtcccaagatgctagtacttctacaaacgtattagtagtactgttcttatctgactactaaattaaacaaacatgtactattcgtaggtcctattgataatggaagaagaaggattctatactaatttgatgaatgagggcaacgattccttagattgggatagtttgagtagtatgcctgtggaggatgatatgagtaaccagcttgatgagaatggcatgagtagcgagcctgtcacgcagcagttcccaactgctgagaggactaccgtggctagaccaaatcaaaaaagatcgaagaattttagcgaacaagaagataagatacttgtgtcggcgtggttgcatgtaagtttggatccagtgctaggcacaaatcaaactcgtgctgcatattggactagaatatacgagcacttctacaaaacgagtaaatccacaccagatcgcagccaaaattcacttatgcatcgttgggaaactatacaagagaatgtcaacaagttttgtggatatctgagccagattgagggtagaaggcaaggcggggttagtatacacgacaaggtaatacatagttatgtagcttgtgtttttatgttactttataaataaaaaatgtgatgtttgctaactacattcaccatacttgacttgtgcagattgctcaggcaattgctgtatttaaggagttggaaggaaagccctttcaattccttcactgctggtctctcttgcggtcacaatctaagtggcatgataagatgaagcaaataacatcccagaaaccctgtgccaccaacagacagaagccaagcatagatggttcagcaaaagctacacccacaaatgatgaaactaccaatcatgttggtgaagataatgaacctacagagactgaagagccaaagagaccgatgggtaagaagagagctaaagagcatttgaggcgtggtgaaacatgcacagatgcttttgatcatttgtgggagaaaaaaaaagaagctgatgcagagaagaagaaggagagagatgagaggcaccaaaagtcatatgaactagataagcagaggcttgagttagataaaaaaaagggtcgcgaatgagacggatgagatacagttgaagaggatgttagaagaagagagaattatgacaatggacatttcttccaagcctctctcacagcagcagttctacaagagtgtacaagatgagatcatcgctcgtcgcatgaacagttccggttgataggtttgtgtttcataacagtttacattcagttgagtgcctgtgttcatgcatatacttgttcttgtgtccatcttgttgaaatgctgcctttgcacagttgcactacaccatctgattcttaaatatgttgcatgatccactgatacatgggactacatatatttttaaatatgctgcatgatgcactgccaaatcttggtctgaaccttggtctgtacatgtattctgattcattttcactccatctcattgctatcaacagggaagccaccagatcagagaatgggagggaaggagatggcaatatttggtggcaatcgtacttggagttcagattagttagaaatttacctaggtttactaagtctgtgcaatacaaactatttatattcgcaattgtgtctattttttgtctctaaattaggtgggtttactaagtctatgcaatgcaaactatttaaattcagaattgtctattcagtagttgggtaattccctcatcctgctgtcagtaatgcttctgtctttgttgctgttgacagagtcagaagcctcatatattttgaaatttgtactaatgatcggtcatcttgctgacaagctgatgcatatcttgcaaattatatataagctgaactgtacctatgactaggttgacaagttaaaggaagtgcacttttattaattctcctgtactattcttaaaccgaacagtacaccatttattcaatacatgaaaaacaaattaagatgatttggcaaatcctcacatgtatattatttattacatggaattcaaacatataaataaaacctcaatatttatccggataatgttgccacaagtgctccactaggtcttcacgtagctggtagtgagtttcgtcgtcccttatttttttgtgcatctggataaaatcatcaagatcaggtatttcatcgtgggacactgacattttctcccccctctgggaaccgttcttcccaatcaacttctccctcatcttcaataatcatgttatgcatgataacacaagctttcatgatgtatcctaaggtcttttcatcccaatgtcgagttggccctcgaacaatggcaaatcgagcttgcagaaccccaaaagctcgttcgacatccttccttactgcttcctgtgctttggcaaaatattttctcttgttgccatgtggttctggtatggtcttcacaaatgtggcccaagaaggatatatgccatcagcaagataatatcccatcgtataattgtgaccatttatactatagttcacttcaggagccttgccttcagctagctttgcaaatagcggggatcgatgaagtacattgatatcgttatgagacccaggcataccaaaaaaagcgtgccaaatccagagatcctttgaagcaacggcttctaaaattattgtaggctcgtgcacgtgcccttggtacataccgtgcaattctgtagggcagttcttccacttccaatgcatgcaatctatggagcctaacataccggggaaacctctgtcctcccaagttcaagtaatcgagttgtatcgttctcattgggtgatcttaagtattcatgttcaaaaacttctacaactgctttcacaaaccttctcaggctctctatagcggtactttctgcaataccgagatattcatccaaagcatatgctgctaaaccataagccaactgacgcactgctgcagtgtccttttgatgacaactgaacccaattaaaccagctgcatttctcttctgcacaaaattgtcatcgtgatcctctactgcattcattatgtcgagaaacagaggcctgctcattctattcctgcgaatcataactaatgagacatgcatatctatgcatataacaaaaataaattatataaaatttacttatacaaacctgcgcctgaataaaactgggccataggtaggattatcggaaaaatagtcttggtataatctcaagtgccgtgcttctctgttgcgatcaatcacttcatgtcccatgacagacccaccatgtcttggtgcattgacagagtgccaatagctatggacgatttgtgccgtggcaaaaaaaaaatcatcgtcatcgtcagacgatgattcatccacgagctgttcaaacgaggagcgaggtcgactcatcttggatcaaatcaaccgccaaaccattattcatcataataaattaagtttttccccttgcgacgttgtcagatcaaattaaaaaaaatgtgattgaccttccgtttttccaaatatttattcatcatatcaaattaagtttttttttccatcaagacattgtcagatcagaaacataaaaaaaggaaatagaacaaagtaaaaaacatggttgctagcaaaattttgctactcacgcactgcacaagagcttgtgcctgtcaccaatcgttgctgcttgctgcagttgcctgattgagtgaagtgctaacatcgccggccctgacagaggaagagctctgattgagtgaagtgctaacgccgccggcgctgacagaggaagagctctgtgtgcgtctatagcactgtgtccttcgatcaatttcgtatatcgctgcgtctgatatatagcctcgccaacggtatcagttgcgatctcgcgcgcgactaggatgagcagccatctccttccgtccgcgtgcgtcgcgtcgaccatgcccattcccctccgcatccgcacgccgcgatctcctcctcgcctctcacgcgcgacgcgatctccccctccgctctcgcctgtgattttaacgagcaggtagaaaattagttgggaagggcccactaatgatgatgtggaaaaattttaaaattttgggaaccaaattttagtcatctcttggagaagggggtgtattttaggctaaatatgttcttggctgtctccaatacaggatttttgggagtttaattttagtcatctattggagatgctcttagtagaatcaaacttattagtagcaatataatagatcggacctaactgagacagtataatattgaaaataataagaaaaagatctagttagccgatagatctacaaaaccatgatggatatatcgaaccaatctaaaacaacaatgtgattggaaaaacaataacttactcagaatatcggacctaactgcgagggagtcctaactaaaccgatacgactctaaataacgatgtagttaaaaaatagaaccaatgtatcagatagacaacgattgcaacaacttgaatagaatgtcatacctaactgagaaagttctagccataccgatacaagcgaagttgaggaactacttccttgttggagatcgaaataatgtagcccaactcgaaaaagttctagccataccgatataagcgaagttgacgaaactacttccttgttggagatcgaaacgatgtagcctcacttgatactaagaactcgtcggaataaaaagtggtggtattacaagtggagatgaatagatgatttacaaagaccacaagtgtacgtatttatacgcttgggttgatacaagtcttgatcggacaatagataagacacctaacaagaaaatgaaaataactaatcctttctatttaaaacatataatacacatatgaaactgccctaccgtggttttcaccatatgatcagcttggctggtaccgtgctcggcctagcccattactagaatctagtccgtcgacgtgaagtgctgaaagcttgggccgtttgcctttaaattccgtccggatttgctgaatcaacaaatgcattcgctctgacgccctgctgtcttgtgtgtgcacgtgttcacgttgatctgtcatctttgcagaatttttcatctccatatggaatttcagctatttgttgtgttgggaaaaccaaaggaccatttctgatactccccctattttatattataagattttctagcattacccatattcatatagatgtgaataaatctatacacatatatatctagattcattaacatccatattaatatgtgcaatgttaaaaagttttataatatgaaacggagtcagtaccaaatactgagtcccatgaaacaactcagaacacatgggcatatcggcagggagcaaagggaggctattattcaactgtactcactgatctcataatcacttggctaaaataaaatcacggagaaaaaggcgtgctgctgatagtagaacacaccgactgcaaccgaatcgccacaaattagcaatcatcaacatacaaaagtatattcacgaaaacaagctaaatatcccagaacacaataatttggagaaaattatctctcaaaatgcggcacaacggtctatcatcagcaatgttcactcatgccggccgcacgtacggccggagggagggaacagccacgtccccaagctacccactggccgtaatggcgtcttgaggaacagctgcgaccggcgttccctcatgtcgtagatggtgcagaagaactccaccgtccgccattgctggccgccgtagccatcggcgccacgatcctgcaagaagaagatgcggtccccaatgttgtgtgccttgccctgatggacgtcggggacgacgtggacagaccgggatcaccagcgcccgacgaacggcacgcggtcgccgccgacgctcctcaccttcctccaccgcgaccccgccatgtccgccgcgaacacctcgaacttggtctgcaactctatctgttcggcggaatacaaagggacgtaggaatcgtcgtcgtcgggatacaaaatgacgttggattgttcgtcgtcggagtatgatccctctctcgtgctgtgattctctttgcggaccatgagcaatgcgccgtcggactccaccaggtagagcggcggctcggtgcggcggccggggcttatccggacgaggcaatcgacgctggacacggtcggctcgccgccggcgtggctgccgtcgtcgtcctcgctgatggagatggagaggaggtctccgctgttgacgagggcgtggagctttccttggtaggagaccatgtcttggatctcgagtgcttgcaatctgtcatgcctgcacgaccacgaggctgaccccggccggcacagcaacagctggctcggcctcttgccgacgacagcagcgacgagggtaggcgaacacacgacgagcttctgcagcggcggcggcgtgtcgtgggtgaccggtgggtcggtgggcatcctggggagcaccatggtgttggccgtggagaacgggctcaccagcgtgtacgcgccgtcgcggcgctggaagacgagccactcgccgcaggagctctgggcgtgcggcagctgctggtggcggtggagatggagcggcagccgccggaaggcggagtttggcaggctgtagaaggtccggtcgggcaacgcgagcatgggaattgccggggcagtgggttccgccgcgcgctgatacgccactggcggcagacggcgccgaagcggacgcggtcgccgtggcacaggatgcgaccgaagatctcaccggcgaggtccgtcgagagctccgaccaagatcgtcgtggcgcgtcctctgtcggcgacatgttcggcgacgccgaagacggcgagatataggtttcccgtttccgtgtgtgtggactgtggatggatcgagcgctgacgagacgcgatacgtgtgccgcgcggatacatcatacaagtcgcagctcatcacgacacgcgaattccgatccgaggtcaaattgggagtgctacgcgggaaagtagtttatacatttaggtactagtcccctcgtctcataaaaaaccaaccagtattggatatgacacgtgctaacacatactacgaatctggatactagtatgtgtcatatccagttctagattcgtttttttcgggacggagggagtacaacactaggccagccataaaaaattgaatattcatgacacgttttttaaactgttaaatgatttgttttcatgcgaaaacattttatatggaagttgtattaaaatatcatataaatatatttttcaattttatagtaattaaaactcaattaatcatatgttaataccaccttattttgcgtaaaacatttaatcttcatctacatgaggttcaaataccatgtatgcatgtgatttaggcagctatataaagatttcataaaatttaaaaagttagattataatgatataatatatatactatacaaatgtataagtctaaattcatatataaagaaataaaaataataaattttacatatattgtataggtactatttattgctttgattttattattttttctctagttcgagactaactttagccttgcatatttgtttatagactcatattatcctaattgatgttattactagtatttcttaattcttttataattatctgaatcgcatataaataacaggttgccatgatatctgggagtgggtgtagaaaaaccttgtccactgctcagcccagcccagcccagccgagatagaaggctagcccaccaacgaaggcctgccactttgagtggagtggtggaaaaggagtttaccgaagggcgaaggggacgaccggaggggggaggcggggagtggggagatcgggatcggcgggggggatggcgtcgccggcgaaggagcgcgacggggatgggaggcgggcgcacgcgacgatggttggggtgcagttcatcaacgccgggtaccacgtcatcgccaagcaggcgctcaacgtcggcgtcaaccgcgtcgtcttctgcgtcttccgcgacgtcctcgccctcgccgtgctcgcgcccctcgccttcctccgccaccgcgggtcgccttcgcaggcccgcacgcctctcacctggcgcctcctcgtctccttcttcatccttgggctcacagggtaaaccccacccactcccaacatctcaggtcactgaggtcaggaactcggtagtggagttctgaagcaatgcagctgctatgctctgaaaaattcgtacttcgatgaatccactatgtttttccctgcagcatcttcgccaaccagcttctcttcttgttcggcctcagctacaccaatcccacatacgccgctgcaattcagccttccattcctgtcttcaccttcatcttggccgccctcatggggtcagtctctttctcactggtttgcgacaatgcatatatgttcatgcttctgtttgtcaaggttaagcattcttgtttgtttcagcactgaaacggtgaacctgagcacacatgagggcagggccaagattggtggaacgatcgtctgcgtgatgggggctgttttcatggtgttgtacaggggtcctgctttgttcggtagtggcgagctcgaacttgatgatgctcatagtcatggtgtcattgctgacatgtcacagcctgagccagtcggacccttgtccattgtgtttgggctccaaaagtggcacattggagtgctgtgtttgacagggaactgtctttgtatggctacttatcttgctttccaggtattactgatttttcagcttgttaaagctcaattttgcttgcactctttgatgttttttttttggggatattgggacgcctggaaactttaatttatgataaaagatatgagtagagctagttctgtaagctaagattactatttaaaaagggtgactttagaaccatgaagtttgtcaagatcattttagctggataaatttcagtgttgacaatttcctcaatcatcatagttttgtccctcttgaaatttaggctatttttattcacttcctaaaagggcacatcctaattagccactagttttaaaaaattcttgtatccctctctttccacacttgccaccaggctctgatgattatgccatacaataatctcttcattttattgtcctgttgctacccaaacatgttctatcaatcacacagggttactgattgtgcgtggtcgaattgtctattttaatagattgacgaaattctgcaaggtgatttgtcatgggctgatcagatcatcagattatacttcaccataaaaacaaagactagtcatttacaggagaccatctatctcactgtactttgaaacttatgtttgtgtggtattcaacttgactttagtatcttactcctgtttgagtactgaaacttttatgcgatcagcgtgctctaacctttcttgtttttatacttatcatattcatctatttctttttcaggcgccaattttgatgaagtatccgtgtagtttgtcattgacagcgtactcgtacttttttggtgctgttttaatggtcatttcaggagtttttgcaacaaattgtaaagaagattggactttgactcgatctgagtttggtgctgttgtatatgctgtaagagttatctcaaatttatttaatgctctgacgtgtatgttcttagtgtgcattttgcatggcttaatatccctttggtacatatatatgttagtgctgatgcagtgcattgggttgctgcatgttccttgaattgagattctgcttctatatgtggtcctattgaagaaaccttgcattagtttttacaggccataaaataatttagttgctgcataccgtgcataatattgtttgaatgaaagtgtgttttatcccttgttgcagggattcatttcttctgctaagtgtgttttatcccttgttgcagggattcatttcttctgctcttaatactggtttactgacatgggccaacaaaattttgggccctgctatggtgtcactttatatgcctcttcagccagtggtttctgctctactgtcgaagttttttctgggaagctcagtttaccttgcaaggtaagaacactgttatcactcactctactttttaatcacagttacaattttttaaaaaaactttctcttgcaatgtgaacaatactgttttggtgcctcatggcctcaccttcctggtgtaaatttgtaatgtatgtttgcatattgatgctgagatattggctatttgatgatagatcaatagttcaagcttctagttaatctatcaattgatcagggtacaaatagttttctatcaatccatttttctcatttctgttgatctaaactctgaagttaagatctttgcttgcttgcagtattattggagggtttctgatcatctctggtttatatcttgtcacctgggcccggcatagagaaaagttgacaattggagtaccatatgaaacatgtgcatctgagttgcttgaaagtacttctcatgtcgtaaagagcagaaacatggcctcggtaccctatatatcgctttctaggccgtcaaacgttccacatgaatcataactcttaagaagttggtcactgctatccccttccttactcagaatatagatagagaaagcatgcattagaaaacatgaagtgccgcaaagaagattcaagtgaacgtagttaagactatatgttaacaatgctgtcatctgtccttggcttagttccccatatggcttctcttcagaaaacagcattcttattcttcatttcctaggagaagttgatttgtgtatgagtaaagagaggttatgctcatttagttttgtgagactaacaactctgaggatgctgcctgaattgactgtcctttcaccaaatgcaaagccagctcagaagctccgtcggcttagtgaatccccaacaaggcaacaatacgtatcctgttaacctcctgcatatgtaattactctgtaaacattatacatgtgcgcaagtcagagcggttaaatgacttaaaaatctatgtatctcctaaatgctagtagtacatttgaccagagtacaccatgtactgtataaattcagtcctggaaatcatgcaagttgcaactcttgaattgatgtttttgtgagattgtccgtgtttgtttggaaatctggaattgcttatttttcgaaattcttagtccacatcatatggtcccctgtaacacatgtttatcagcaattggaaagcttcagatgttattatgttttgtatttcaaatcatcgtatgtatatacataattttctcaactgtgtgtgtacagtatcacactacgtttttttcccactacagtaattcgtgatttcatatggaaatgtgcatcggagtcacttgaaagtacttctcatgtcgtaaagagtggaaacatggccgtgccctatatatctctttctaggctgtggaacgttccatatgaatcataactcttaagaagttggtggtctctgctatcacttcctttgggtatatcctgtcctcccttgctcagaacgtagatacagaaagaagtgctgcaaagaagattcaagcgaaggtaggtaagactatgttaacaatgctgtcattatcctcggcttagagtccctatatggccttctcttcagaaacaacatttagttttgtgagactaacaacacttagaggttattctcatttagttttgtgatagtgagactaacaacactgaggttattctcatttagttttgtgatagtgagactaacaacactgtggatgctgcctgaattgactgccctgttaccaaatgcaaagccctctcggcagctccttcggcttgttgaatccccaacaaggcaacaatacgtatccagttacgcttttgcatatgtaatgtaagtactctgtaaattatatttgtgcacaagtcagggcagttaaatgacttaaaaaaaactgtgcatgtcctaaatgcttgttcatttcaccaagtcatgccagttgcaactcttgaaatcgatgtttttgtgagattgttcttgtttgttgcaactctggagttgcttatttttcgaaattcctagtccacatgatggtcctctgtaacacaagtttatcagcacttggaaaacttcagacgttactatgttttgcatctgtgctcgtgtagttaaaatcattctttcatttcatatgtactctacataattttctcgaagtatgtgtgcacttatactacgtgttccacagtaactcgtaatttcgtatggaaaatgtatacgtgaattctatacattgctacgttggtttgtatcattggtgctgtgactggagctcggcctgcgtgacgaacaggccatggaagccgtaggggacgcgtccgggcagctgcacctccgcgacgatctccaggtccggcgaccgcgcgtccatcaccacgaaccggttctcgccggtggcctcgtcgtggacgtagcacaccaagtacccgtcatcctcgttgccgttgccctcgacgtcgtcggccacgaagaacggttcgccggcgaagcacccgggcccgaagtcgcgctgcgccacggtgcagtcgccctcgccggcgcggtcgaagtcgagcttggccacgccgccgatcttgggcgcggggtcgccgacgccgaagtagccgtacctgttgcggcggccgaggaaagccgggttgatcacggggaagtcgaagttcccggcggcgagcggggtgcgcgtgacgacgccggtgcggaggttgatgcgcaccttctcgacgcaggagtgcactagctccatgtgctccagggcgtgctcgatggagaggacgttgggcgccaccagcaccagctcctcgccgccggcctcctcccacgcgttcaccgagtgcatgatgttgaagcccggcacctcgaaccaccgcatctccgactcgtcggtggcgtagcgcgggatcacgccgaggcggggcaccttgccggggtccgaccccacgggcgagccgccgcccaccaccatgtccatgggcttcatcacgatctggatctccgggaagatggcgtaccgctcggtgatggcgaagtcgtgcaggaacgacggctgctgcacggagaagatgggcacgtcggcgcccttgttgccggccgggtcgaaccggaagtacgtcacgaacggcggcacggggccgtagcggaacgcgaagagctcgccggtgacggggtccttcttggggtgcgcggtcatgcccatgacgaggcggccgccgaagtcgcacctgccgtgcgtggtcacctcgccggtgtccgggtggacgcgcacggcgtaggggaggtcggactcgccgagcgcgtagaggcggccggcgaagtaggcgaggctggtgttggcgagcccgacgccctccaacggattcatctgcccggtcaggaccctggccgccacgacggcgccgcgcgccatcccggccacgccgtggaagccggagaagacgttgggcaggacgggcgcgccggcgtcgcgctccacgaggtacttgtacgtctgcacgtagcgcgagcacaggacggggtcgtcgccggacgacgcgggcgacgggaggaggagggagtgcagcatgccgtcgccgtcgaacaggtggtgcggcccgcgcgggaggtgctgcgggttgggcccgttgcggatgtaggcgccgccggcgaggcagcgcgggatggcgccgcgcacgacggggcagggcgtcggcggcagctcgtccacgggcacgaagttgctggtcagcacgttccgcgggtccaccgccggccgaagcgccggcgggtcgatgaacgtgttgatcacctcctccagcgcgttgcagaacgtcatcggcagcgaagcggccgacgccgcggcggcgggggcaggccggcggcgaggccgagactggctcggcgccgccctgccattcgtcgtagcaataacagttctcgtagtcttggtcttggctaccaactgctcgtcctcttgctcggtctgcttcggagtgcgggtggtggtcaccagcggggaggtgagaacggtggtggaggcggcagccgatggcggagcggcggaggcgttcttcttcctgccatagctggggctctgtggagcagcagaagcagcaggagggatgtaggaaagcctcatggacttcatggtgagtgagtgagtgaccgagcagtgagcagggcaaatcctttgcatgctactactactgcactgagttgtgagattaaccgtgcggctatttataaaggcctctcttgctaagagaggctgtccctttcagattcgtgctagaccgggaagaaagatagtacaagtacctcgtgataaagatactaatcactccgtacccatagaagtcgtttaggataatttttaagtcaaactttaaaaatataaatcataaataactatcaagttgttgagcttgaaaatgtaaaaattatatgaatagatttgtcttgaaaaatactttcataaaagtatacatatatcacttttcaataaatatttttaatgaaacaagaagtcaaagttgtgttttggagaccgtgtcgctgtccaaaataacttcctttacgagtacgaagggagtacactactactgtaccacttcagacaagggaaagatacggcgtaattttgtacagttgtacctgtacagttgtacctatgaactatgaagactatttgactagtaaaacctggacgattggcaagacactctagtaagattctcaaaaaaaaaaaaaatcaagaaatggcattagcaagcgcccaatttcaaaaaaaccatcaacaaatacaagttccataaaatgatatcgtgcgagctactttattccaaaaatatcattgccgttaaggtttcgccagcaaccctccgttaagtgctataggatgaacagtgtatttaactgtgtgggatggacgaaaccctaacgacgatgatatttctgggacaaaattatttgtatgatggtatttatagaacccgcactcatcgatggtattttttggatttggttgtttgtcaacgacatttcttgaattttctcgtgctcaaatggaaatatttttcaaaatattgatccctcttttgatagctagttgttttatttcaggaatgagattttcatgaatatgcgtagagtgaatatttctctcaagcaaatagttgctgattggttacaactattgtaattttaatctggacatccttttcctttaagtcttttaaataacctttttcatacttataaaattatactaccgagcaaatgcctagtagttgttcctaaaaaaattactctagtaagaaacttcctctgttttatattataatataagtagtttttacctttttttctaatcaaaactttttaagtttgattaagtttataaaaaaatgcagcaaaattttcaacacaaaacaaacatcggcctgggagatctgctgtgcaggtccaaagattgttgagatgcgggtgtgccagtcagtttggtcctgcaactgacaagatatgtaaacagtagatcaaacagccgatcggctgacaagccgatgtagtgattccagccgatgccgataccaaccgatagcgatagggtttaagcaatcggctatgtgtctaatgtagataatgatataaaggcaatcggctgatgatgatagaatacaacaacaatataatccaatagaaaccaattggctatcaatatgatagaataagcactggtctgaaggctaaagcatacatcggctggaggtccgatgtcataaaatccacaagattagattaaacgataatatctttgttgcgatcggctaaatccaatatgtatgtatatgcaatccttacaagccgatgcaacgtccagataactcatcggctgaaaccccgataaaacccttattggcagtcaaaaagcaagctagagattatggttctaagcacgacttagtagatcaaactcaactgatgcagcactaagtatgaaaagaaacacaatatctagacaatcaagccgttgactgagttttcagggtggtagatgtctaagctaatctaatctagcaacgcgatttagccgataccgacagaaaccctaaaacgagaagcagccgatagagctaaattgatatgctaagactagattaacatagacatatgataaataggtaggcaagtatatcatccaaaccagaacaatccaagagatcgaatgtcctgatgcagccttaaacgacgccgacgtagacgatataattgtctgggccgacggaacattggacttaccccttagccggagatcgaacaccgatgcagccccgcgtcgggtgccaagttccggcggaacgtagaaacaaaagtaaaagtaaaaatggtggcgatgcgccgaattgtattgatcgtgaggatagattacaatgaccctgggtgtacatatttatacccatgggtagatacaagtccttgtcggacaaaaaagaaactttcctaaagataaaaggaaaagataaagtccttataggacactaaacacactttcttaaagataaaagtaaactaacaaactattcctaattaatagataacttgccatgccgcattctctttgaactcggtctcttctggataagcttcctttagtagatcaatttccttaaccgaatatagcaagaatccgacaactgacgacttgacaactctcatcggctaatctcaagacttcgaagccgatgctgactctaaaccgatgactactccgggcttactaaatttcactgttaacaattatcgaaatatattcaatgttatatttaataaaactaaattggtgttaaaaatgttgctaaatttgaccaaacctaaataaggttgacaaaaaaaaacaaagtgtctataatatgaaactgaaggagtatactataaatctataatcaatctaaaatctggtgtatggatacatgttggatatacccgtgttggtattgcctacctagaataggatatatttgcagtactctacattttcatctccaaaggcaatcagtttttttgagaacaatcatctggttttgcatattttgcgttacaaacagatttcgtatttaatttatggtagcttttaggcagcatgttggatggaggttaactttgcgacaactccatttgccataaggcccataactgggcaagccacacaaagggtgtgttcggcactccatcttctcaacccctctccctcgttttccgcacgcacattttttaaactactaaacggtgcgttttttacaaaaattttctatacgaaagttgcttaataaaatcaaattaatcctttttttaaaaaaagctaatacttaattaatcgtgtgctaatggattgctccgttttccgtgctggatgtttgggttggaaacctgggttgccgaactgagccttaagtgtggccaataatttattggctctaactatgacaaactttgactagaaaaatgagaatatgatgcatgggccaatatgctaatgaagtgtggtttgacttaactgtgacactcaaccaaatattaatctaaaaaattatggcacgcctaaggtttgatgtggcaaaccatggccaccaaccagacagctccgtacctcttctagtatcaaaaaggttattgctaatatttcttttgattctaaataaccattttaaccttctcaactctttcctaaacacaggttattttataacttataagtacctatcataatttctaacacgtttagctcatcaaataaatattgtcaatcttatatataaaaggctcatccttttcagcactgtatgacagtatgaatgaagtataacaaagttcctttagttcctttcttatttcttatgcacaaatctaacacaagttatatctggaattaaggcgagcaaatatgccgacaccaaattaatatgggaaaaactaagaaacgagatgtcagtgagtgcaaataggaaatttttcattgaaatttacgagtttgaagaatgaattaggttaccaagtaaacacaaatagagggagtcgatagtttttaccagaatttttatttctatctaaaagtttcacaaaccatcattttacgaattgggtgtggattggtagggcccacactgtctatatcgactcttctttttactcgtcccctgctaccatacaattttccttggtcgccatcgtccatttccatcttcccttcatataatatctacacagttatgtatgaacatcactagagaaagcacaagtggtatgatggtgaagttgtgggtacataactctactcagcagggtttaaattctggtactcacaaatattacacacatatagatgggctttcaacaagtatttagggagatcagggatgtaacgctggtttatatcacttagagcatgtgttaggggacgcatttgcagatgaaggcgaaataactcatgtaataattagattgataatcaagagattatatatacaggagagagtccaaagccttccatattttaactaccgatttataaaaacaaaaaccagggagagaaggaaagcgactcaaataacccaaaacaacctaagtagtctatcccccctccacacacacacacacacacatacaaatcgtattgggaggacggatgttgagactagaccgatactccgtgaatacggaagtgggtagaccctttgtaaaaacatatacacactgtatagtgtcaggcacatgcagaacgcaaatttcaccaagagctactctcttacgaatgaagtgtaagtcaatctccacatgcttagtccactgatgctaaactggattggaggagagatagacgacagaaatgttatcacagtacaccatggtggcacgctagagtagggatccaagctcagcaagaagctgtcgcaaccaagtagcttcgacaacaccattagcaacggcacggtactcggcttctgcactggagcgagagacaatatgttgacgcttggaagacacgagacaatattatcaccaataaacacaccatagccggaagtggacttgtgtgtatctggacaaccagcccagttagcatcagtgtaaaccaccatctcagctggagaagtttgatggagtaccaagctgtgatcaagaataccatgaagatatcaaataacccgcttaatcaaagcaagatgtggctcccgaggatcatgcatgaaaaggcaaacttcctggacatcgtaagctatatcagggcaagtgaatgtcaaatactatagagcatcaacaacaccataataattagtaggatcagtaacagaggatccatctccagagagtttggagtgcaaaaaaagttcttgatgatatgaggggcaacaatgacgttcttaagaaggaaattacggaagggggtgtctaaagatatagagcaagtgacagtaatagggataacagaaccattgcctacgacaatatgggaaggagtgaccgtacggtgtggagaattagagtgagcaagattaccgacatccaatgtcatgtgatcactagcacaagtgtccatataccagtttgtcgatgatgggggagtcagcgtcatatagttgaatgcactggcgagggtgccctgatcctagtcggcctaaggaggcatggtctggcagtgccagtgtccactgctgagaaggaggcaatccataagtaggtaggccggctgaaaagcccatggcgctagggtgatcgacaacaagagcgtgcagacgaggctgtgatgtgccggggaagaacgagtgcataggtcacaccttggacttagctggcccaaggatgctagaaagtcgacggccagccaggagcagccaacgcgccagtgctaggagagttggtgctgcttgtgttgttgttgtcgccgccattgcttttcttgtgtcgatgattgttcggataattgccgtcagaagtggtggtggtggtggtggtggtggtggtggtgatcgagccgttgttgccagaagtgttgccaccaccttggatagtcgtgggcgcaccgccagatgcgccacccataggtgaagaggagcctgtggacgggaggggagcagaggcaacgagggtagtggagggagtcgcaagcttgttattcactgtgtcagaatgatgatagatctatttagattcgtagtaataagatgtgtcatattccgtatttatgagatggagggagtatagaggaacacgtatttcttttttttaagttgatcacaagggaaatttaaatcctgatccctgaatactataggttacagggaacctgtagtcgagaagagctgaatgctgcgtgagctgtagaactgcagataacagatatggctggagcaaaggagatgcgaagcagagagtgaaagagaaatacggtgattcacaaccgacgcaacctggaatcccagcatcatcctgtaggtgaggtttttgttcgtagttgaacgcgtgcacgcaatgtggtgcacgtccaatcataccacacataccatttcagctggcagaccaatcgtcaagtctgtcttgcattcagacgatggcatgatttttttttttaaaaaaagggtcttgtgagaattttttttctgaattcttacatatagaaaaactgaaatgtttccataaaattcatccgctaaatcctacattacacctaaaactgacatctagtaggaagcaaagaatctgcccgatataaccaacagtatcgcctactaatatctgactccaatatcacccccgcaccagaattaatgcaaataatcaggcactggaattgtagcaccacaagaagactccctgtaaaagacatactccctggagtatatagtacagtagttttgctgtagttggttctttgattgcatgggaagtgagtggcgaggatggctgagcccggcaacatccatgtcatgtcacgtgtgccatcgccgccatctccatcgtaaatttatgatcaaatggaatccagtgaaccctgaaacggttgagccgagccacccgtgcattgccttctcttccactccaaccccaaaccgctgccactaatttcgctcacgaaaagcataaggtaaaaaaaaaaatccatgggtttatcccggtaagcttcggctgcttgtgggctgtggctgtgataaattggacggatcagagcaaacagtaaactgcagcaagaagccaagaagctaaatcgtttcagtggcggatggccagcaagatattcccatgagtgatgagaaagcaacggcggtgacggcgatgcggcaatatctgggggacattttgtgtaggtgtgcattgtgctatctgaatcattggtggtccctgtgctccaacagtaatgcttcgtgttttgttcacaaaaaaagtgcagctcagatgaacagggagctcagggtccccctagattttttttttgggtgaaatttgatcgtgtaaactgccttctcgagaataaagacgttttacactggctttgttcagttttttatgtgtgcatagagttcgagctattgagtacccattttgtcttaattaatctaacaaattatttatgtaaggagtaaatatgaatcatggaatgccttgtacgtaaccaaccaagattaatttttattggttaaacctatgcatcatttaaagtgtgaactaatttcttttggacacgaagtgtatttgatgagaagatttcagaatgatgtatattttggtattcttggtgttgatgtcctttgtgtaaaggatggtcatattgggatagaaggagtattttctaagataaatgtgatatatttcatcaagaaatgatattatggttgctcttggttagaatttcttttattttttgaaccatctattttttttgttttaaaaccaaacccttttaaaacttactttcaaagctggttgggatggcgtgaccaaaaaattcagataataagtttagggatgatttaattttaaaattaaaatttaaaacgttcaaaaataattaaaaagtcgcttggttaatagtcttaacacagacaaatgatcaacaagaaacaacgctgctcaaccaatataaactattctacacccgggatatagaatagctattctataccccctccctcccaagggccaaacccacctcccctcttttctaagagttcaaaacccacctcccaccttagtcaaaggtcagtcaaagcactctccacatcggtcaaagcctggtcaaaccgcctaccaactcccccaccacccacctcttctcagctctcatcttgcggaacagtgcagtaacgcgacagccatcgtacagtaacgttgtgtcttacgtgcagtaacagcattcgaatttagttgaaatatagtcatgacggatctacttttgataatcactttttttctagcatcatggtgcaaacggttttaaaaaaatcatacatcacatgagaaatattgttattcaaagcttcggttttttggatcttgactctccacaagtagtaatactatagcattattactactcgttactactatgtgttgtgcgttactacaatcccatcgcgacgttattgtaagtgtgcagtaaagaccataagttttgtagcaacaatgcgtcttactgcaattcttgaatagtgttactgcataaacatgtggtaacgtgtacctgctatgtagtaacactcccactttgtgcggtaacaagtatatttagcatgtgagacttttaaccctttttttttatttctggtttactacaatttcatcatgatgttactgccaaatatgcagtaacgttctgtatgttctacagtaacaaagtgttttactacagttcttagatagtgttactgcataaacatgcagtaatgtataactgtcaggtggtaacgtgtatatgccgtgcaataacacttttacttttgtgcagtaacaagtatatagttagcatacgagactttgaacccatatatatatattttttgtttcaattcctgatttactgtcaaaagtgcagtaacgtcaataacactatattagagggaggataccgattttcttaagaagagggaggaagaatggtttcttgaggagggtgtatgtagatgcattttgaagttctatcctccacatgcagtaacactatagcatcattgtgaaaacggttttaaaaaataatacatatcttgtgagatattgattttcaaatattggcattttgaactttaacactccatatgcagtaacataatatgtaatttgcagtaatatgggtatatacatgcagtaacatgattttaccaaatgtataaaattgttcaaaacactcctacatcaatcagacctcgctcaaagccacctacagactttacctataggctacctattcgatcttcatctcgtaaaaatgacatagtaaaactacgattatcgtgcagtaacatagctacttggaagtggtaacatgcacctattatgtagtaacacttctacttttgtgcagtaacaagtatatggttagcatgtgaggctttaacccatatatttttgtttcgattcctggtctactacaattttacacgacgttactgccagaagtgcagtaacgtcctatgtgttctatggtaacgtcacatgttaatgtacttttacaacaatgttactactgtagcatagtaacatgttatgagtttgggtagtgaaagatattagaattgataatcatattactttctcacaaattcttgaaacaaatagcattattagatgaattggttagaggaatgtgctttgaactatgacatcatgggttcaagtctttaatttggcaatttattttttattttccgagaaaatgtgtttcggggagaaaagaatagtcttaacacccctccccccctctctctctctctctctctctatatatatatatatatatatatatatatatatatatatatatatatatatatatatatatatatatatatatatatatatatatatatactagtagtgtgtccgtgctaacgctacggtgacaattaatattgcaaatgaaacaaccaaatgacagtgatacaatatgcttggacaatggtatatatatatagagggacgactcttccgtactcccaggtgaaccggtttgaaaaattcaaaaatcaagtatgcatgtccaacggatggaggaaaatcaaccggtggaaaaataattgttctataataattgatccatgcatgtctgtttataatgctaaatgtgcactgctgcagtatactattattttgggagtaagtatatactatacactcgttagattagtttgtactatcagtagtcagtatatactacaaatctgatttcatactcttttttttccttgacagtatatactgcatttctcgatggagcagtatatactactttttatggtttgtgttttttttcttcaaagaagcagtatatgtatttttttttcttagcatacagttagtactactggtagtactatgtactacttattaaatagcagtagcatatacttgttttgacgttgtagtatcattatatgctacattaattcgtcgataaagcagtatatacaattttttttgggtcagtatgtgtatactacattcctaatcacttaatcaagcagtatgtactacttttttttgttcggtcagtatatactgccaagctagcagtggtatatactgtttttttagatagtagcggtatatactgtttttgttttattagtagtaggtatggggttgcttatacattatgaatcacagagcacaccacatctcaagaaaaatcagaatacattaggacttacgagtagcaacatgaaaagaagtacatatctgcaatgacagattcacaaacaaaatcactagaaaaatacataaagcacaaaagccgccatgaaaaccctctttttatctattgtcttgggataaccatactgcttctttaggattctctctaagagtgatattttgaggtgtgaaaagtttggtatctcaaatatttcacacaatatttgtttcttcccatccaattcatcttgagagcaagggataataggttgacctgagcatggcaagctaaaaactgcattgacatcattagaaccgaatggcagctcctggttgacatctttaacaatagcgcatgatttcggatcaactttgctcagttgccatgccccaaactgcatgtgtaccttagtaaggctgtgtttagttcacccccaacttccaactttccatcatatcacatcacatccaaaactttcctacacacgtaaactcccaacttttttttccaaactaccaactttccctaaactttcaacttttttcaggaactaaacacagcctaagcttgatatccaaaagtccatcaaatccaatttcaccaatcaagtccctcttcctatcatcaaagtctttaatgatattcactacgcatttgggctgacacctgcagttgataccaaaggtagtgttgtctttcttttgtctatttaatactctgctttgccgatacctggataccacccgtgcagccgtcttatttaggctgccccttgtgccagaaaccttcaaagcctgcagataatcatttttcattacataaatagacaatactacatggaccagtttatttaaaaattcaacatatacttctgtttaaaaaaaacagcatacactcatatattcatatatgtatggaaaaatgaagtacataatactgagtagcaaattctgcctatgtgtaccccctaaataaaaaaataatcatgtctattgaaaaaaaaagtaagtatatacaaagtttagagcttactgctgtctaaaaaaatcagcttatacctctctatgtaaaagtgcagtatatagttcttcgtaacaaggtccagtatgtaaaccactatggaagagactcagtatatatgtggaaaaatgcagtatatgctatcttctagaaaagttcagtatgtaccacatagaaaattcaatacatactatatgctgtcgtacaacaaagttcagtacaaagcctcccatagaaaaattcagtatatctgtgaaaaattcagtaaatacttgtgcgtatcaaagttcagtctatgaaccactatggaaagattcagtatacatgtggaaaatgcagtatatgctatcgtctaaaaaagttcagtatataccccatagaaaaattcagtacatactatcattcaacagaattcagaaagaacccctccataaaaaaaagagtatatactatcgtctaacaaagttcagtacaaagctccccatataaaaattcagtatatactatcgtctaccagagagttcaggaagaaccctgccatagaaaaattcagtacataataccgtctaacagagttcagtaagtatccctccaaagaaaaaaaatgagtacatactgtggaaaatttagtacgtactaccatctacattttttttgggagggggggtgggggctaaaacagcatttactttatccacccaaaaaaccatcatatgcactaaaaggggaaaaaatagcatctgaaactgagagcgtacatgaaccgaactacacataattgtcacgccctgaagtttccccccttttgcttgctttaaaaattggctaaataaatcgtccgaagaaattatcttaattaacctagagctaattccctaattaataaatgcaaataataatcggaatcggcatgtggaatttttcttggattctacatgtcacaatatattaacaggatttttagtggaattttcagagccttggaaataattttaaccaattaaaaatcaccaaagtgcaatttttaaatcccaggaaaatcctttcttttctttttctttttcctgtttcctcctttttcctcttcttgggccgtcggcccagtccacccgtcgcccgcgctcggcctccccttgtgggccggcccgttcccctttcccctccccgaagtcctccctccctccctctctccttcgggcgccgacaggtggggcccacctgtcggtcgtcttcctcctctagccggttggagccgagccccaaccgccggcgccccacctccccacgccgcccgccttctccgtccctctccgcgcccgcacctcgcgcccacgtcgccgcctcttcccccgcatctcccggcccgcgcgcgcgctcgagagggcgggattcgatttcgaatccacctctctcactctccctccactccccacgtcgccggccaaatcggccacctccccggccacgtccgccccctcccgcacctataaatcgctccccgcgtcttcctctctcgtttttcgcactcgccgcgctctcccgtgcctcctatcgcgctcgcgccgcttgttgctagtgccgccgcttgccgccgccttcggccgcgagccgccgccgctagagtcgccgccgcgccaaaccgccgccgccgttagcttcgccgccgcaagagctttcccggccgccgcctcgcgtcgccggaatcccaccggagcacctctcccctcgcgagccggtgagtttttccctcccctccatctccggccgacaattcaagccgccgtggtcgtcgtctcctctcctaacgcctctccatcttctcctagggtgtcgccgccgcccgtccgtgcctccgcgtcgccggtcatcgccgctcgtctcttcccacgccggtcgccgccatcgcctcggtgaggaatcccctttcctccttcctttcctctccccccgtgagcgccgccgccctccgcgcgtgcgccgtcgtcttcggctgccgccgccgccttcgcgccggccgccgccgtctccccgcgccgccggtcaccgccggcggtcgtgcgccgtcgtcgcctcgccatggccggccggcttgagccgtgccgagcatgtcgccgcccactccctcccccttgagccactgcccgtggggcccgcttgccagccgccccctctcccccccttagtgccgctgatcagtggggcccgcctgtcggcgccaccccctcccctcgctgacgtcagccctgggctttattgcgcaataaattgattaaggacttttctttattagtaaaaacacagtttatcttctaaaattcataagtaattcatccgagctccgtttaagtccattcaagtctcagtaaatcaagaaaaatgcaaagaatccattaaaaatggttttgttccctgtttcagtagtcttatagcctgttttgcttgtgtgctttgtttgtcgcgtaggtttcggccgttttgtcgatccacggtttctcgaagacgttgctgaggtctcgtcagtgcgagagcaaggcaagtcatgaaatacgtttgatcatattgtacccaatttacaaatatcccgcatttctattaaatgttgcattcttttacaatgtaatgtgggatgggtcctaatcctcagccacatattgtttaccatatgccgttgataacttgggtatcaaaatgactagatgttggtttaggaaatgcttagccatgcttagttcaactagcacacaaatggggatcaccttattacatagactttgtctattggcatagctttagattggtgccaccgcaatggtgttagttaattaaaatacactgaatggtgggctgtgggtgcatggttttgctggtcgcacccatggcagttaaggaccggttcacgggaaaccctgggagacttaccgtgctttccacaagcgggagtgggtaactgcttgatctgaagtatagctcgaccctttcctaggcaccggtggcgagggtgggcgtgatggagttgggtcggccggggtgtccggttgtccagctgccggattcaccgcggcgcaagaggggaccgcccactgccttttgaggggtgggggtgaaaccttagcgtggtgtggatgattaggggagggttatgtggagggtcttgtcacgatttccccctttgcagtatcatggtgatacttcggggcatggcgacatgtgtggaatcgtgtcttgtgggtacagttgtacacctctggccagagtaaaactattcgaatagccgtgcccgcggttatgggcgatcaaccagattcaccgtgattagtctcattcctagtttagcttaatgaactggtgtagttcaggtggttggttgggcctgttgcaacgtggggtagcgttggacagtgtttggttaatattgattaattactacaactgttttactgccttcaactactgtttttaaatgctagctttatgcaaaagaacctctagcctcctttggttatatcctgcatcatacctcctcttccggtatgacttgctgagtacagtgggtagtactcagtcttgctctcttttcccccacaccagagctgaagatcttcctagttggagctgttttgtcaaagttggtttcgtcgctgccgtcaaggattgcctgtggagtggagtcgcccgctgctgaagtcaagcttcccggtttagctcgcttttatcttttccgctgcatttgtaatcttttctatttttgtaagacgtggatctgtatgtcaacaattgtcgtttgtgtaccctggctggtcctggacagggatttaatgcacattcagcttagaaattctggttcgagaatttctgggcgtgacaagttggtatcagagccgaccttgaccgtaggacaagccaactggaaaccctaagagccctctgaacccctttttcatctgcatatgcctttttgcacctggaattgttttgggaaaatttggagttttgcctctttggtttgcgggaaaaatcttggtcgttcattcggatcggattttttttttaaaaaaaaaatgagctcagcctagggctttagaaaaattttagttggagtttattcgatagtcagtcgggaatttattgggggttatgcattaggtcgtgtctatattcgatgggggcaatgttatgcgcatcattttccatgcaactagtctatgcattaatttattgtttagttgcattagtgtctttatttgagttcatgaaaaatgttctatgcataaaaatcatcctgctcggttattgatttgagtcttcttttgctttgtttaatttggatttgagcatgaattggttcctatcccttgtctactttagatgtcagtcctatccctcgtttgcaagcgccgcctcgagcttcagagtcaccgcccttagctttatcgccttcttagtctgtttgcttgctagttttcgtgtttaggtttgatgcttgtgggctagtcggcggtcgatatcatgtgtcagtggtatgactgcctcaattaggagttgcgtgcctctttttcagtgttttaatcaagattaagataattgcacttaaattcataagaaagattagtttctgagccccctgtttttcttccttttctcatatttctacctatccccttcagatggagacaaggaatggttcacgcgactcgaacaacgccagtggcagcgaaaagccgatcaatggagcacgtgccaacagtgcatctgacaacagtccgtccccaccgcccgagaacccaacaattgctcaggtgttggacaatcagactcagatgatgacaatgatgatgcaacagatgcagcaacagtaccatcaggtgttgcaacaggtgcagcagcaagcacagctgcagcagcagaacctgcagtttggttctccacctcctcagtccaaactgctagaatttcttcgtgtcaagccgcccaccttctcaagcaccaccaacccaatcgaggcccacgactggcttcatgccattgagaagaagctgaatcttttgcaatgcaacgagcaagagaaggttgcttttgctacacaccagctgcaaggtcccgcttctatttggtgggacaactacatggtgacccgtccagctggggcagaggttacttggacagagtttcgtcatagtttcaataaagcacaggttcccgagggaattgtggcacaaaagaagagagagttccgttccctgcaacaaggaaccagaacagttatagagtatttgcatgagttcaacctcctcgcgcgctacgcccctgaggacgtgcgtaccgatgccgagaggcaggagaagtttttgtctggtcttgatgatgaattgactaaccagttgatctctagagattatgaggactttgagaagctggtggataaggctatccgtcaggaggagcactgtaacaaaataaaccgtaagaggaaggcagctcagttcaggactccccaggggaagagtcagaagcctcgtttcacgatgggacgtcacggtggaccttccaccatgattatccgacagcaccgtccctaccacccgggtagcttcaacaagaaccaccataatggcagtcacaacaacagtgagcagcacagtctcaaccctactccgagttcactaaagattccagctcaatcagttcagccagctctgccagaacagcccaagaggttgggagaaaaacccgaactctgcttcaattgtaacaaacccggacacacggttggaaagtgcccgaagccaagacgtgctggacccaagttcgttcaggcccgtgttaatcatgcatctgcagaggaggcgcagtcagcaccagaggttatattgggcacattccccgtcaactcgacaccggcagtaatattgtttgattctggtgcaacccattccttcatttccaagcgttttgctggtgcacatgggttatccttagtgaagcttaagataccaatgcgagtgcatactcctggaggtggcatgaccacaactcactactgcccatctgtgacagttgaaattcaagggttgatttttccagccaacctcattcttctcgaatccaaggacctagatgtcatacttggaatggattggttaacaaggcacagaggagtgattgattgcgccagccgcaccatcaagttaaccaatgcaaaaggagaggtggtaaccttccagtctctagtgccgcggaagccagggatcagtttaaaccaggctgctggtgaagaacaagaggtagcagtggagaaaaccactaagaagctggaggatattcccatagtcagagagtatccagaggtttttccggacgatctgacaacaatgccaccaaaaagggatatcgagttccggattgacttggtacctggaactgcaccgatccacaagaggccttacagaatgggagccagcgagttggcggaagtcaagaagcaagtcgatgagcagttacagaagggatacatccgcccgagcacgtcgccttggggtgctccggttatctttgtggagaagaaagacaaaaccaagaggatgtgcgttgactaccgcgcactcaatgaggtcaccatcaagaacaagtatcctttgccaaggattgatgacctgtttgatcagttgaaaggagttactgtgttctctaagatagacctgcgatcaggctatcaccagttgaggatccgcgaagaggatattccaaagacagcattcatcactcggtacgggttgttcgaatgcacagttatgtctttcggactcactaatgcacctgccttcttcatgaatttgatgaacaaggtgtttatggaatttctagacaagtttgtcgtggttttcatcgatgacatacttatctactccaagcccgaggaagaacatgagcagcatcttcggctggtacttgaaaagttaaaagagcaccagctatatgccaagttcagcaagtgcgacttctggcttaaggaagttcagtttctcggtcacatcgtgaatgctcaaggagtagctgtggatccagcaaatgtggagtcagttaccaaatggaccccaccaaggacagtcactcaggttcggagtttcttaggacttgcgggctattaccgccggttcattgagaacttctctaaaattgctaagccaatgacacagctattgaagaaggaagaaaagtttatctggtctgctgaatgcaataggagttttgaagaactcaaacgacggttggtgtctgcaccagtcttaatcctgcctgatcagacgaaagatttccaggtctattgtgatgcatctcgccaggggctaggatgtgtgttgatgcaggatggcaaagtggtttcttatgcttcacggcagttgcgtcctcatgaaggcaactacccgacgcatgatctggaattagccgcagttgttcatgctttaaagatttggcggcactatctcatcggtaaccgttgtgaggtatatacagatcacaaaagtctaaagtacatcttcacccaacctgatctgaatctccgacagcgaagatggttggagctaattaaagattatgatatgggaatacattatcatcccggcaaggctaatgtggttgcggatgccttgagcaggaagagctactgcaatgttgcatgggtagagcaactatgtggtgaggttcaacgcgatttggaacatctgaaccttggtatagttgagcacggattcgtggctgccctagaggcacagcccacgctggtggagcaggttcgcatagctcaggcaagtgatcctgaaatagcagagctcaaaaagaacatgagggttggaaaagcccgaggttttgttgaggatgaacaaggaacaatctggatgggagaaagattgtgtgtacccgaaaacaaggaattaaaagacctgatactaaccgaggctcatcaaactcaatattccattcatcccggtagtactaagatgtaccaagacctcaaagaaaagttctggtgggtcagcatgagaagggaaatagctgagttcgtagcactctgtgacgtctgtcaacgagtaaaggcagaacaccaaaggccagcaggtttgctacagccacttcagattccagaatggaagtgggaagaaatcggaatggatttcatcaccggtttgcccaggacgtcatcggggcatgattctatttgggtagtcgttgaccgactcaccaaagtggctcacttcattccggtgcacactacctactcagggaagaaattagcagaactctatctatcaagaatcatgtgtttacatggtgtacctaagaagatcgtgtctgatcgaggaagccaattcacttcaaagttctggcagaaattacaagaagaattgggaacccggttgaatttcagcaccgcttaccatccacaaacagatggccagaccgagcgagtcaatcaaatactagaggatatgttgagagcctgtgcgcttgactttggtggggcatgggacaaaagcttgccgtatgctgagttctcgtacaacaacagttaccaagctagtctgcagatggcaccatttgaagcactgtatggacggaggtgtcgtactccgctcttctgggatcagacaggggaacgccagttgtttggtacagaagttttaaatgaggcagaagagaaagtcagagctgttagggaaagattgagaatcgcgcaatctcggcagaaaagctatgcagacaaccgccgaagggagctcgttttccaagtaggggattatgtgtatctccgtgtcactccgctcaggggagtacaccgcttccaaaccaaaggaaagttggcaccacgctttgtgggaccatatcggattttggaacgcaggggtgaagttgcttaccagcttgagcttccctccaacatgcttggcatccataatgtgttccacgtctctcagttgaagaaatgtttgagagttcctgaggaacaggcaagtccggatcaaatcgaaatccaggaagacttgacgtatgtggagaagccaactcgtatcctcgaaaccagcgagagaaagaccagaaacaaagtaataagattctgcaaggttcagtggagccaccactcagaggaagaggccacttgggaaagagaagatgagttgaaggccacccacccgcacctcttcgccagctcttccgaatctcggggtcgagattccgtttaaggggggtaggtttgtcacgccctgaagtttccccccttttgcttgctttaaaaattggctaaataaatcgtccgaagaaattatcttaattaacctagagctaattccctaattaataaatgcaaataataatcggaatcggcatgtggaatttttcttggattctacatgtcacaatatattaacaggatttttagtggaattttcagagccttggaaataattttaaccaattaaaaatcaccaaagtgcaatttttaaatcccaggaaaatcctttcttttctttttctttttcctgtttcctcctttttcctcttcttgggccgtcggcccagtccacccgtcgcccgcgctcggcctccccttgtgggccggcccgttcccctttcccctccccgaagtcctccctccctccctctctccttcgggcgccgacaggtggggcccacctgtcggtcgtcttcctcctctagccggttggagccgagccccaaccgccggcgccccacctccccacgccgcccgccttctccgtccctctccgcgcccgcacctcgcgcccacgtcgccgcctcttcccccgcatctcccggcccgcgcgcgcgctcgagagggcgggattcgatttcgaatccacctctctcactctccctccactccccacgtcgccggccaaatcggccacctccccggccacgtccgccccctcccgcacctataaatcgctccccgcgtcttcctctctcgtttttcgcactcgccgcgctctcccgtgcctcctatcgcgctcgcgccgcttgttgctagtgccgccgcttgccgccgccttcggccgcgagccgccgccgctagagtcgccgccgcgccaaaccgccgccgccgttagcttcgccgccgcaagagctttcccggccgccgcctcgcgtcgccggaatcccaccggagcacctctcccctcgcgagccggtgagtttttccctcccctccatctccggccgacaattcaagccgccgtggtcgtcgtctcctctcctaacgcctctccatcttctcctagggtgtcgccgccgcccgtccgtgcctccgcgtcgccggtcatcgccgctcgtctcttcccacgccggtcgccgccatcgcctcggtgaggaatcccctttcctccttcctttcctctccccccgtgagcgccgccgccctccgcgcgtgcgccgtcgtcttcggctgccgccgccgccttcgcgccggccgccgccgtctccccgcgccgccggtcaccgccggcggtcgtgcgccgtcgtcgcctcgccatggccggccggcttgagccgtgccgagcatgtcgccgcccactccctcccccttgagccactgcccgtggggcccgcttgccagccgccccctctcccccccttagtgccgctgatcagtggggcccgcctgtcggcgccaccccctcccctcgctgacgtcagccctgggctttattgcgcaataaattgattaaggacttttctttattagtaaaaacacagtttatcttctaaaattcataagtaattcatccgagctccgtttaagtccattcaagtctcagtaaatcaagaaaaatgcaaagaatccattaaaaatggttttgttccctgtttcagtagtcttatagcctgttttgcttgtgtgctttgtttgtcgcgtaggtttcggccgttttgtcgatccacggtttctcgaagacgttgctgaggtctcgtcagtgcgagagcaaggcaagtcatgaaatacgtttgatcatattgtacccaatttacaaatatcccgcatttctattaaatgttgcattcttttacaatgtaatgtgggatgggtcctattcctcagccacatattgtttaccatatgccgttgataacttgggtatcaaaatgactagatgttggtttaggaaatgcttagccatgcttagttcaactagcacacaaatggggatcaccttattacatagactttgtctattggcatagctttagattggtgccaccgcaatggtgttagttaattaaaatacactgaatggtgggctgtgggtgcatggttttgctggtcgcacccatggcagttaaggaccggttcacgggaaaccctgggagacttaccgtgctttccacaagcgggagtgggtaactgcttgatctgaagtatagctcgaccctttcctaggcaccggtggcgagggtgggcgtgatggagttgggtcggccggggtgtccggttgtccagctgccggattcaccgcggcgcaagaggggaccgcccactgccttttgaggggtgggggtgaaaccttagcgtggtgtggatgattaggggagggttatgtggagggtcttgtcacgatttccccctttgcagtatcatggtgatacttcggggcatggcgacatgtgtggaatcgtgtcttgtgggtacagttgtacacctctggccagagtaaaactattcgaatagccgtgcccgcggttatgggcgatcaaccagattcaccgtgattagtctcattcctagtttagcttaatgaactggtgtagttcaggtggttggttgggcctgttgcaacgtggggtagcgttggacagtgtttggttaatattgattaattactacaactgttttactgccttcaactactgtttttaaatgctagctttatgcaaaagaacctctagcctcctttggttatatcctgcatcatacctcctcttccggtatgacttgctgagtacagtgggtagtactcagtcttgctctcttttcccccacaccagagctgaagatcttcctagttggagctgttttgtcaaagttggtttcgtcgctgccgtcaaggattgcctgtggagtggagtcgcccgctgctgaagtcaagcttcccggtttagctcgcttttatcttttccgctgcatttgtaatcttttctatttttgtaagacgtggatctgtatgtcaacaattgtcgtttgtgtaccctggctggtcctggacagggatttaatgcacattcagcttagaaattctggttcgagaatttctgggcgtgacaataatccctctctacatgcatacatatattcaatttcaggtggcataccttggactatggtgacaaactgattttcatgtgaccctgctgcaaacaagaaaattttaggcatcgtgtcttgatcttgccgtacaaaaataaacgaatactaacctgctgctttggatgaaatccactgctatgccccgtcgattttgccatggttgccccgctcctgcattcagccgactccagatcaatgacctctcctcctgggacaccaacgggtggcatcgtctccagatcgattactcctgcttcagtaacacagactgttgagagaggagccatcactggaggaagaggaaggggaggagtcatcactggaggaaggaacgagctgctatctctgtaccgccgccagccacccagtcgccgctgcatcgctggtccgtcgtcgcgccgccccaaaaccccaaatttcgggataagcagttcggtcttttaattagaaaaactaatcggatccaccgaggcaaacccgttatgatgagtgagggagtacgtatctgatcgatcagatgaacggtggatgggagggggagttcgtactccctaggagtatagaaccattttcatatatatatatatatatatatatatatatatatatatatatatatatatatatatatactagtagtgtgtccgtgctaacgctacggtgacaattaatattgcaaatgaaacaaccaaatgacagtgatacaatatgcttggacaatggtacataaaacatatagctaagctaaaaaaaacgataaagagctattagaaaaatatcaatcaatatgtatatatatatatatgtatatatatatgtatgtatatatatatatgtatatatatatgtatgtatatatatatatgtatatatatacatacatatatatatatatatgtatgtatatatatatatatatatatatatatatatatatatatatatatatatatatatatatatatatatatatatatatatatactaattaaatttgtttggtgctccatggtgcctgggcaccattgttgaaattgagtatatacccaattcaaatgagaaatgagtatgaaactttttcaattacttaggtgttaacattaactactttactctatatatatatatatatatatatatatatatatatatatatatatatatatataaaagatacccatatgggactccatggtgcccgggctccaaggtataaaacacacaaaatctctcaaattttttaaaaaaattaaattgtgagtatatacctaggtatatgaatttgattcataccaatacctaacaacaaaataactcaaactcaactttgtttcacaattcatttttacatacatagcgaattatatgtttggatgttatatacctagaaccaaaatctaacaaaaaaaaagttcaaactcagttcaaacttgtttgaacttgttagtaaagaagttaatgttcatacttaaacatttaaaaaaattcatactcatttaaattgggtatatactcaattcgaatcttggagcccatactccatgtagcaccatatatatatatatacatatatatatatatatatatatatatatagggatgcgctaaaccgcgcctggggtgcgcaataactaaactactcccctcacaccaccccaccccaccccacccccacccccctgcgcctagggggctctcccgcacctttctctccctcaccatttgtctttcagtaaataaattacttgcagttaatatcttcttattagtaaatgaattactaactaatatattgatttttgcattgtaatcccgcaccttttggcctatccattccaactacaacccacacatttctcttgcacacgtagtaaataaattactctctgttaatatcattttattagtaaataaattactcggaatccaactcatttcttctctcagtaaatggattactcccaggttgtagcccttctcagttggttcattctctcagtaaatgaattactgtcgggttggtctcatttattctcttagtaaataaattacttaagataatactacacttaattggttatcataccttctcgcagtaaataaattacttaaaataatgcattgatatcgtcacaagatttctcttagtaaataaattactattacaccaatctcaacataacatattgacattgccaacaaattctcttagtaactaagttactattacaccgatggttctcaacatatgtctcttagtaactaaattactattgcatgcacgaatccaacaagcaagacgacgctagtgcctcatatcgatgttgatccgacaaagcactatagattccttaggtctccccatcgacaggtatccatcacccacgaacatctagagaggcatcccacaaccacctggatatagacacaaacgattacatcatctaagagaagtctttaatttacactcataaatgactctaaataagatatgatttgctgaagaagaaataaaatgcttcataaaaaattgagcaacaggaagagagaatatgtgcaaaatgcagcctcaatctgaagaacataaatcatagaataaattttagaactgatgagtctatactgctttatttacaggaatacactccattagactgatcatagatttcagatgttcacatgcatgttaaattaagaaccaaaattctaattgacacattatcagttcgccaagataaatccagaaaaagtgtgcaaagtgtacgacatgaaacatttagagcatccatgtcaaatgaaccaaggatcctatatcttcagagatcacccggatatcattgaggtcaagagaaaagttcaatttggcagtcagtaaagatctgtttccagggaacatactattatgcataaaaatgatactaatcaaatagactcgtcctagatttttcacgataccaatgcccaaataagctaaaatgatatggaaattattcatggatgaaaactcccttggtgtccttgatccgcacctgcagaactagtgaaggacatgccatatgcacatgagcaattagaacaacgatctcaatcctctgaatatgaaaaaaaaaaagcatacttaagcaaaaaaaaatttattgtgtgcccagtagcaaaacacctgcaccaagaacaaggatttgtgccaatagactgaacaataaaggtctcaatgtacatcgttgtcagtataatcctcatctgcattgatgctgcatccggattctcactctgcccctgcgaaaaaagacatatcttgtcttttcatgtctagttataaacactaaactaaaacctgggaaaattgcaaccataaagcatagaagattgaatcgagaagaaaaaccaccatgaatctgaactgcgtgggggaaaaaaggcctgatcaccaatcatgcaaacatgaaaaaacaaaaacgaaaaaaaagaaagggaatagatcagattggcatggcagcaccaaagacactattcctctcatgggggatgcagacttcaatcacgcagacgagttcagggttgtcgatggtgtcgcttgtgaaggaacgcagacggtgccggccctcctcctcctttgcccgcaccaacaacttatgcaaatccaatccaaatgctgctactacacctcctcagcgtcctccacaggcggcggacgagggcagcaggtgtgggcgatggtggcgatttggaggccgcctacggacgaaggcggaacggcggccgccgacgaggacgaaggacgttggctcctccgtatagctcgccaatgcggagcagatcggcggcggcggaagagaagtcggtggagaccatgggcggaagaaaggcaggcacccgtcgtcgtggagcttgcctctagatccaggcggcgtggtggcctctccccggtgctgccttttctcaaattgccgccggcaacctcctcgttccagatctgaaaaaagcaaaagaaattaacaaaaaaaatgagtgtattaaatcctatatataggaggaagtttagtagtaaaaaaattactactgtatgggaaaggagagggggtcgggggtacaggggaggggtggggtgggtaggggtgggttgtactgtattatactacaccccatctgtagtatatatatatatatatatatatatatatatatatatatatatatatgtgtgtgtgtgtgtgtgtgtgtgtgtgtgtgtgtgtgtgtgtgtgtgtgtgtgtgtgtgtgtgtgtgtgtgtgtgtgtgtgtgtgtgtgtaactaacatatactctgacgaacattcagctttattgtatgcaatgcgcctatggaatattggaaactgtacatcacctctttttctcctgtaacttatgtatgggacttttcctgcacacaactattccagtaatgctaagtgatcgtagtacaagtggttacgtaaccaatctatgatgttgagcatttgcgcgatgtctacacattcgttatgtgatatgtgagagtgcaaatatatttctcttggctttcttggctttcttgttgctagtaaaaaattgggtcaagatgaataatagtattaccctgatataataaatataatagtagcttaatatttattacaaactttaataggtacgagtcatcgtctttgccattgtattaccctttatcctccacttattttctattggtgcgctccttttgtgagtctttgccattgtattaccctttatcctccacttattttctattggtgcgctccttttgtggttcatgatcatatatgttgtagtaagtttttaaggaattagtttaatttttattttaaatttgtgtaaaaatcgttagacctatattcaggcgaccatgacctctttattggaaggaatgtgaatgtctgtgtagcaatttttatctcaaatacattaacaattaattgctagaatcaaaattaatcacatgaacatacattttgaatatgccttgaataactcaatcttgactaatgaatctttagttaaaggatgaggattttttttcttcctttttttctttccacttcgactagcttcatctcgggaagtttcttgaatgggttcttttaccatccatctaatccaatggtattcactctcttttgtcttgtagtaaatccaaaggttaatatttactaaatgatatagctcattcttgttccacttgggatttttctttcctctagttaagatgtgtcatccttaagaagcaagatcatatcattcctcatattaaatggactattgaggtcacccatttagaagaatttcatccatcccacatcgttcctaacaaacgcatgcgtgtactctatagtttggcagtactactcatggctactttctccgttttatattataaggctttctagtattgttcacatttatatagatatacgaaagccttgtaatatgaaacggagggaaacggagggagtaacagtttctccatgcggctggtggagcttaacaacgagatgtatcgctcgtactcatatgacaaaccgtagtgacattatctgccatactgacagacagcatttgtcctggacaacagcgtcattgtctctctcaatacacatggctacaggtaccaggttgattgacaaggatacaagatgaacattgaaacagaggtacttgtacagtaaggccgtgtttactctcaactaccccaaacttccaactttccatcacattacattacatccgaaactttcctacacatataaactttcaacttttttttccaaacttacaactttctctaaacttgcaacttttttcaggaactaaaccgttcggcctgtttggttggagggagttggtgatggggaatgagagtttatgatatctgggagtttaagtttgtagtttgtttgaaagacatgggaattcgagggggtttgggatggggaattaaaaggtcgaattcccaccaatctcttacctgggggaggcctgttaattcgtgagatttgaagggaattcgatgtgaaaacaaataagggacgaggactaaaaatgtaactcccatgaccaatcccaccatcaactctctctttaaaactcctattcctcttcacttctcttgccaaacaggccgtagtgaaatagacacgggcaggcatttattgatttcaatgcgttccaggtctttttcctctcgtgtctcgagtacgttggtgtgttcatttgaaagttgcaaatactgacagttgcaggcttgcggatgcgtacgaaagaacaacaaaagagaagttcatttgcgtcggtgcagatgattcgtccatacaggattgcacatacattgattcaacggtctcagtttgaaagtgactttgcaactactcatttatcgttcaaactgttaaaccgttaaaaggtgtattttttaaaaaaagaatactttttatgtagaaggtttttagaaaattcaaataaaaataatttttaaattaataatatttaatacttaattaatcatatgctaatagcatttcacatgcgacaaagaaagctaaggcaaaccgttctttcgaacggagctgatcaatcatatcttttttttttttgactttcgagactctgagagtgaaaacagaaaaaacatggaaagttgcagctgcatacgaaagaacaataaaagaaaaatccatttgcgtaagtgcagatggttcttaggtgaatgactgcacgcacgttcatcgatgagatgagttctgttcctttttttacttttgagagccagaaagtgaaatgagaataatactgcaaagttgcagctgcatacgcaagaacactaaaagaaaaatatatttgcgtaaggacagatgattcttgacaaggacaacataggagaggataaataccagttatcaaatacaaaatagaaattccaatgttttcgagatctccatgtatataacaattgattgaaatttccaaataaaatttgacaggctgaattcggatggaatcatggatatgacacataatcaaatataatcagataattccgctgtcatgcagcggaaacctggaatttccaaatgaaatgcaccttttctaaaaattttcaaatcaattgtgaaatgccaatttactatacatttcctttgtgggcagtatttatccttgtcaacagtatttgaactaattacaatgtagggaggcccctaaagtccaacaaaaagaaactatatgaaattacaggcagcaggagcatcatagtcggcaatgcagtaggttcgagatgcccaggacactaaaatttatcctgctgctgaaacgatcatgtacaccaatccaaaatgcaagaccgactaacctcctgcctccagttactctcaacaacagatcaactggccatgcatcatgcgtcatcgcaagctcttccatgtctatccatgaatcactgtttgtatcctcttcacagataaatatcgaacggggaccctatggttcttcagtcttcagttctttgtgtatttacagagtctacctctttgcatatatacatacatgctcagatgggcatgtccaccgaatgataatgtgggaagtcatttgttgtgtgtgctaactgatggacggcagagtgggttgactgaagccaaggccagacaccccatccaaagaaccaggcactacatgtttcacttgcccatatcgcctgatatgacgaaggagccttgccaggaaggtgctgtgacagatagtagaggtgtcacataccacggtgacatgccggcatgcccttgtaatagccacattcatgcgcctgctgtcaccaaggaaacctaccgctcccagtgggtttgatcgaacctagaaataaaaacagaaaatacacatcaatgagggagtattttgaagatttggtgagttgaaatgtaagacggaatgattgttatcccgttgggcattgcccccgtaaatgccatttgcttcagcattgcaatagctcagcgtataaatcagaaaagtggcaggtgtagaacagaggataggacgcttaccatcgatatgacaactgcatcagcttccctcccttgaaagctatctatggttgaaacctcaaccccagaaagccctggatattcttctagcctctctcttaacaactgcacttgagcaatgtagggtgattgaacggctatcgctgttggagatactcctgcgatcatgattttgatctgcttgtaagttcaatattttgagcacggaaaatatgtacaagtttgatcccttttttttagaaccttgagtgtgaaatgctatctgattaccctgatgtgcgtgtaactaacaaaactgaaaaaggattggagcagaaggaatatacaaaaagagccttaaattggtaaaacaatgtccaaggcaatatctaattaaagtagaaatatgtacataccaccagtctaaaaaaaaatgtacataccacaatgtacaaggttgagaacatgttgtgtcacaatatctgcctctccatcattataaaatgagcctgtaccagaaaggtctatttgttccccacaaccagtgtccagggccccatatggcattcgagtatcaagtaaaagcagtgggcaccgtgttatccaggtagcctgaaatcaaaaggacaaaggtaaaatagatcagtttttttagagaagaaaatagatccaatttacaatgtaataccaatataaaatcaactcatatagatgcattgatgaaaaagttccaggacatggagtgcacatatttcaaatgaatagcacaacaattaaaagcaaaacttgtgggttgatcctagataattcaatatccaactgtctctttcacagataattctccaagtaattattgtccccaacatccggtttcaacatacaagaattaattctacctcatattgactgttagttttggaaactagctgactggatcagcaatatctttggatgtatgtgagggtgaactttacgctatcacaaactgtttgtacccgtagatctcgtcattactccatatagttgcatcatacaatagtccacatagtatgcatactatataggatggacagatatgtccaaattgtcttcgaaatttatcataagactggattcagaaaagaccagtctttatgaaggtcgaacactaatgagcttgcaaagtggtaaagagttaaaagaccaaatggcatgtgattcagatcccctggaagaacaaaagcaaattcatctaatggggtccaatcacaacttatttatatgcaacccttcaatggaatccagtaagtttaaataaaaggattgcccacattgatatggaattcaatcttgagcaccaaaacagaaactaattacatgaacaagcaatcctgacacctgaactaaaagcatgtatgtaccttcacaactggagagtcagcaagagtttgtgaagcaacagaatgagaagatttgagcagtccatgatacatctctttagatgcccaactagctattgagtcattcattctgtgctgcactgtcaaccttgttgtcagtaatccattgtgcaatgacgaagctctttccaacaaagatttaccaagccctccatctaaggcctttcttgacaaaattactggtgcaagctggcaatgatcaccagcgagaatgcaacgctttccctgcaatatgggaatccagcaggagggttctattgcttgccctgcttcatctatgattaccaagtcaaaacaacatgttctcctgataagtggatcggctgcccctgtgttagtagaaagcacaacctgtgcctcagagagtgcttccctaatcatttccttttctttcttttccagatcccttccaagttgcttcagcagttgacgaatgccggcagctaaagaatcatcctctatgcagtagctcaggtcctttcttaaatcacttctctttctctcaagctccttcctgaactgctcaagccttccgttcacaatctccgccaaggactttgaagcaacagatggtgatatccgagcagggtttccaactcgcacaatgttcaagccagtgtttgacaacctttcaaccatgttatctactgccgcattgctaggagctgtcacaaggacgttctcaccctgttggacagcacgtacaatgagctctgtgagcaagactgtcttgcccgtgccaggaggaccctggataattagaacaggcctcttcttgttcaagcctaatgagagagcctttaactgggaggcatctagtgcatacctctctgatatcctcggatcaggtgcacttgattcaccccagtcagtcaggtgattctgctccatcttcataacatccttgttgtccccaaataaagtggctactacgccaatggatgcattgcttttctgtaaaccattcctttgaagaataatcaatgcttcaagattgcgctgccaaatgaaaatatttaagaattagatgaaaacttttaatcatgttaccggtagcatttcagaataagcactatgtaaaaaatggaaccccccatccactgttctttcctaaaggtggaatttcccttgttctggttgtgtacattttgtgccactctagtgtaggatgcaaacagaatgttaattaattctgcattaggaagatgatgagtttctcctgacaaagatgcagctcaacatcccacatcccattatattacaataagatccatagcacatccaccaaaaagtttcaaataattactagactttctaaaagtagacaagcattcagaactgcagacccttcagtcctgtgacaagattcaatatgaagaattcaaatacctcatatgtaagagcatcagccaatccttgtatacggtcaatgcgcacacttttcccgaacagcctggagaatgtaggatcaccatggcgggattccagagccagagttatgctgcaaccatcctcccctagattataaacaaagccttgcatgcaagaagttgctccttcaccacggctattacatgttcttacacagaccatgtccccaggagacagtgtggttggaggcagcttgtgtccgccttcaattctgaatagaaccaaatgtaggcctcccaaccctacacttacggcgatttgcaataacaacaaagaattgactcatgaacttttcaaaagcataagagatatctctaagcatacaaagaaaaggaactactcaggtctagctctctcaccagttgagctactgatcacattcaagttgcaaatggtatcgcactgctcctgctgagactgcccatggctcaccaggtattcaaccggtttgggtggctcagaatcatcgtcgagcattggggcagcattcagctcctcctgtgtgaactccagctccacatcccgttcaatgcacagcaggtccgacatatgcgtcacatattgttcaatccttctctgcatcaatttcaccttgttgaggcttacgccaatgctaccgtgcacagctttaggccgtggcaccgtcctgcgcacagcctcccgatgctgcacagaattggccatttctttcagaagcttccatgactgtgtcgatcgccaatcggagatgagtccctggttctggcaactctgcagaacatcacggagctcacgctggaaatgatcaaagagtgtggggtagtgtgtgcaggccttgaggcagagtgcttccaggcccttgggcatggggatggccgacatgtaaggctgtgcctggatcacgaacccaagcctcccatctgcagatccccactcctgagccaatgccgccgcgtcgaggtccgccatgtcgccctgcagctcggcggaggcgaacttggacgccatggattgcatcccttgcctcagccactccaccacgcaccggccgagctccttccgccccagcgggtcgccgttctggtacagcgtcccgaccctgatggacgcctcctccatggacggcacgcaccctctctccccccgctcctccccctcctcaccctgctgcttcctccgccgccgcctcctcgtcgtcgtcgtcctgccattctcaccggcaggtcgcggtcgcgccgcctgcttggcggggaccgacggcgcggcgcgcacgcgcctctgccggacagaaggggcgcccgccgaccgcgacggcgtcgacggcgaagcccccgcagagagaagcgtgatcgctctcctgctcgggaccctcaccgcggcggagggagagagcaagaacctgcacgggaggagatcgatcgacatgctactgctgcagctgcccgcccctgcgcccgcccacggccccggctgccggcggggcgcagtcgcgcgcgcgcgggaaaggaggggagggggggggggaaccaacgagccaaccgcgcgcggggggaggcagcggcagcagcgatcgcggtgatatttccggcgatcccgtggcgcgagggggcgcgtcgcgccgggccccgccggcgactggtggcgcagggcgcggctacgtcgcgaccatacgcaaacgagcaaccagtaaaagtgccgtctccggctttggtttgtcgcgccgcgggcgcgggctccgcgcgcctcgtgcgcccacgtcgccgcccgggcgcgcgcgcgcggtttccgtggtcccgaaaggctcgtgacggagtccaacggatgtaacgcactttgccatccaaccagtgaatcgcccgcgattcccatgtccacgcaggcgctgacgcaggggcgccggatgcagattcactggctcggcgagaaggaagcttctgaggattcagaagatccaaattttggaaggagcggacggtccgagggatcctcgttcaccgaccacaagagaaagcggaagcacgcgtggccactttctccctcacaggcattcggacgaacaccttaccggcgtggcggcgtcacggtcgggcgtgtgaacggtgcgaggaggatgatgattcgtcaaaagcgaaggttgctgatgctctctaagtgaactgactgaccgacgcgatcctcgcggtttggactttggaggcggccgccgtcggtccgggcctcaccggcgccggcgccgctcgtgatgcattgggacttgggagccagcggatgaaaaattcagaggttgatttttatgagacggagagagtattctataaacttatcaaccgtactgatgtaaaaattatcttcagcctctcatcctctgtttgctagtttatcagccacaacaacatttaagttttatactccctctgtttcacaatgtattttctccgttttataatgtaaaactttctagcattgtccgcattcatttaaatgttaataaatctagacatatgtatgtgtttagattcattagcatctatatgtatatatgcaatactagaaagtcttacattataaaatgaagggaataagtcattctagcatttcccacatcaatattaacgtgggaaatattagaatgactatcttataaaatggagaaagtaacttactttcaaatcaatttatttctaaaaaggttgtctaatcaagtaaaaaggtcgtgacagaagaggattacaacgaaactttgacgataaaaatatccaaacctcaattctttttttttcttcattcatttcttccataacttatcaacattagctcaagggaaattttgctacaggctaccgtgacttcgtggttttagctgtagggcactgtacgaagtgacttttgggggaaaacactcctcaaagttggatatttgttggtggacatcgcgcgcatcaaagtaataatttccggttgaaaaggagagaaaaagcacgtgaaatgtcataaatgctcttgggcccatatgtcagctctcctatctctcttctctctctatcccctccttcactactctctctaatatcttctctctctatcccacatgtcagcgacagggttgggcaggccaggtccgacagagggaggacgagggcagagcggacgcgaccagcagcgcacccagacagcatcaccgaccggacagcaagcgaggtttggcggtggcagctgtgtgtggaggagcggtggcgtggctggacgacgacggctacagcgcgcggagtgaggagggagaggctcagtcggtggtcggtgccgctgtccgagcgtgcagctggctagagacgtcgccttcccgtcgtcgcggccgctccgcactcacctcccgttgccaccgtcgcttgacctcgcctgccgcccatcatcgctgacatgtgggatagagagagaagtgaagtaggggatagaaagagaagagagataggagagctgatatgtgggcccaagggcatttctgacattccatgtgatttttctctcatcttcaatcggaaattattactttaatgcgtgcggtgtctaccagcaaatatctaacttttggaagtgtcttccaccaaaagttacttcatgcggtatcctacagctaaaactgcgaagtcatgatgtcctatagcaaaatttcccctagctcaaacaaccaaatagaaacattggcaagaactagctactataatttaatattaatgttttcaaaaatggttgttagataacatgagtatcataaagtaagatttctccaaatttacatcatgacgcatataggcatatgtaagctgagatattagaaacgggtataacattttggagaaaatgggtattataccatcctcaaaacgaggcttcgctgtaatgccattttacaattgggattcgtccaaataccactttcaactcggaccaacccgctgaaatgccattttcttcatctgtagtaaatcaaaatcattttgtcccttttcttccaactttgatgaccaaactgcccctggttgattcaattccaaactgccccacggcgtgaggggaggggcggcgacctcgtgtatcatatctggtactgaagatgcgatacctccgatatcatgttgacatcagctagaacgacagtaataccgttgtgtagtctcctagaaaataaaaatatcaacagcaactcttgaccgatggccacgacgcggcgcggcgcgcgcggaggaggcccacgatgaggcgcggcggcgtaggggaaggcccacgatgcggcgcgacggcgcgaggggagggcacggcggagcggtggcacgaggggagggcagggcggtgcagcggtgctaggagagggtggcgcgtcagtgctaggggagggtggcacggcggcgcccagatcggcgctcagggaacaggaacaggaaccataaccctatcgcgtgtgtatttttatagcagtgagtgtgtaagtgttgtggacgcatgtgtttgtaatgtgtttcttaaagaaatatagatgagcatttttattttgcaccttatttttcgcatgaatatggcatttttttcgtatacacataaaaaaataatctagctggccccactcctgcgagatacatcaatggaaacaactcacatgaagtatacagcaccgagaaaactttggaggcctcgaagtggccagcatcaacaaaacaatcatttgaggaaggagcccgtgatggattacggctttacgggcctatttggttaatttattcctaattttggcatatcatatgtagagttgtatgcaattattcaatgtatggttgcaacgtgtattgacacgtttattaaattttcctttgaaggaggagaccaaataagtcaagtcctcaacacgtgtattgatcttcctttgataataacaaacaacgcttgcttataaaaagcactcgacatagtagacaataatatttggttatcttatagtccaatagcatacgctatacatgacttttaccacgtaaaggaagatactacgaagatagtgtgtgtagtgttgactatcaacatggaacttaaacgtaatttatacatatatagtagtagcagtctaaacaatatacttagaaagatagtatagctagctatggactattaatccatattgaagctagcatatataatatgttaattaactataaggtcttttctcctctatttttctcactatggatttaatgtaaataccttagaacactcatcactataaattatgtgtatagctagctattacataagagccaacgctcatcatttttcttatctctctttcacataatgagtttatagctgacttataacatgatattatcctttctctcaaagctaaacacccacatccagcattaaaagctttagaattagttgttgaaaatatttatttcggttatcgaggcctgtatggttgaatccagttgaaaattcagatcttttaagctgaaacttttgaactttcaatttaatgaccaaaatctcttctactacatatcttttttgacaccgagccaaaagtttttaaattttatactagaaagtttgaacaatcaaatatgttggctgggaattgattttgcagcaaaacaattgcaacaagtcgatgcgaataaagaattaagatttcaaaaccgttcaatcaatagtacggcaagcggttttgtcgataatcatgattgttagtactcgacaattgaagaaaaccgataaaataggctaaacttttgtgcacttcaaacttaaatgattaagtaaatttcacaaaattacacatgctttgactaaattatcataaaactatgtatcacacaactaaagatttaataataatttattataaacctatatgtctaagagtaagtatcacaaaactacaaatttattattaagattatccgaaaacaaatcctagccattcgtttttattcaagattagtctctaactaaacaccatatatctctattaattactaccacctctatcaaacaaaaaattacgactaaaaataaattctcttgttaacctcattattaattttctcttctaaactcctaattctcttgtctcgagttgccgaacaggaaggacaacaggccgatagagcaaatgatgaaccctgtcttctcttgatctcttctatcctctcctctctcaaccgcatcagtccaagctaccaaccaaaccaaacacggtcatccgaaatccatccaaatctccaaacccaagtgctcaagcaccaaccccaaatcccctctcccccccaatcctcaaagatgccgtcctcctcctcctactcctcctccgttagcaaccctggtcccgagctacctaggtcagcgcgccaagaaccatgctcttgtctcctccagctccaccgccgctgaagccgcccgtccgcctgaatcgactcccgcagcggcagccgggaggcggcggccggttcttgctgccccggaggaggccaagaacgccgcggtcctttggcgtggtggtgtgcatggcggagatggccagggttgggaccgggtcctcgtgggaggaggagttgggcgtcccggaggagagcgacgcgatcctgggaggcggaggcggggacgggcaaaggcggcaggcgaccaggtgggagctcgtcgaggcgagactgaaccagacggttagtgcatatatgaggattaatttgatcgtgattaccaatgttcatctgtcatctgtgggtggctgggtgctttactcttagggcagtacaagattacctcaaattatgaactactccctccgttaaaacatagcaacatttccaacacaaaacaaagatactactatcaaaatatatccaatgctagatttaacaaaactaatttggtgttatagatgttaattttttctgtaaatttggtcaaactaagtttaactagaaaaaagtcaaagtgtctcgagggagggagtaattatagttgggcattaaattgaactctcatacttgaaacttttgcatgacaagctgaaaagttcaaaagatgaaaagctgaaaaggttgaaggactgtgtaacttacgtacacaagggcgtaaaaaaaagaacctgaatattctgattcgatctgtgaagggaatgtgcactgactattgaggggtggcaaatcatgaattatctttagaggtagttgttgttatctttgtagatgtctagcttcagtaaattgttatgaactaggcttttccatacggacgtttaatttcactcagatgtaggatcttcaatatccaattcctgaatttatgcagttatatctattaaatttggagacagaattttgattacagctctctactgaagtgtaattaaccataatgattggcattagcatcactgcttctctacaagttgctcttaattttgttttctctgggaacactggaactcgtactaaagttgttatgttgtgctccagagtaaatggctggtcgcgggttgttatacttctgcagccatttggaagcatgatgctcttattatgtgggctatgattggtgctgttctaaactctatgttttcaaatcttcttaaacggatattcaaccatgaaaggcctgtgtctgctttgcggtctgatcctggaatgccttcatcccacgcgcaatcttttctctattctgcggtgtttctaattctttcatgtaagcactttgagatttactttgaaagttcaattatgatactgtatgtcagtataatcacctgagtttggctagagatctcagttgttttcagcatttcatattaggtagtgttctcattcttttgttttgcaacatgccaacatggtttttatatttcattgattaagtgaattgagcgcaaagatggttttcctatctatctatcagcaaattcagtccatctgatccatattctaattctatcaaattgtaatgtccttttagaaatttataagcacttcagatagctaaggtgttgtgtatatgtacatgtacatgtaattttgcattttccttggatacactatgcttttttacataattttggattttcagaagaaagatatttaagaaagaaacctatcactttctttaaaaacattggagactggagtagaccagtacctcctatatccacaattggttgcccctttgcaatgtaatgcgtggtttatcttaatggctcttttgcagtgttctactggctcgggagaacttatctgtcagttattcttggggttgcaattctagcaatgtgctgctatcttgtaagaatccttcctgagtaaaaatattactccgtaccatattatagcagcaattggtcaccttgcaaactcttgcatctttaattcttttagtttgattgcgatttccaagttcttcagtgcattctaatcataattctacttatgtgcagtcgtggttacgagtgtcgcagcacctccatacactgaaccaggttcttgtgggtgctatagtaggatcagcctttggtgctatgtggtttgcgctttttaatttgctcgtgcaagaggcgtttgcttcttccgtaccggttcagattgcggtgactatcgggacggcaatattatgcatcggctttgtcatccatgtcgttcgccactggttcaaggatgagtgaatagcaatatgaaatcgcaatgaccaataggtgattgattgagacacaaaatcaactggtaacggaaggctctgtatactctatgggaagatcatactggaattatttgggagtgggttcgcaagatagtcacagatagcaacctcagttcattttttggcatttttgctgcaggatagtcacagcactgattcttgtaatacagaacagtttatgcttgaaatttcttccacgaaatgataatgatgtccttgctttgcgtcacttacattttccctttcacagatatacctgagactgtgtcgtattcattgcttccacgctaatctcaagagatggcaagagagcattcgatatcctcgtttgatgaggatatcgtagacgattttttttttcctgtgatagatacttttttttttctttgatagatacggatgatcattacttctgattcttggtagtagatactgaaatgatcagttaattcatttcattgatagatacggagatgatcagttacttcagacttcagagaatcagaaattccgaatgccttgcaaagttggtaacgtgattgccgctcgttttaatctgacgacggtagttcacccgtccaattgcacagctgagatgcaattatacatttacatgtgcaaataaccgacaagattaacgctacacaaacagaatggtaaaaccatcacaattcaagatcacgaacacaatgatcagatcaaaattgcgattttcaaaaccaactccagtggagtgagtttgcatggaccatggattactagccatccacattcctcgtattatttttgcacaaccaactatgcaaagagggatttactgtgagggaatggagccagtcctgtagggagatggcccattcgacatttacagaggaagcggcgaatgaagattgcagtgatcacggccgatcaccaaaagaacttatacaatcttttctttcccctaggattgtatagttagagcttgttaggatttctgaagggtcgagaagatacatcttcatctagctctaatcgctgttggtattagagtcttgactggcttggggctgcgctgcaggtaggtaggaccaggcaatggctgctgtgccaagggtaactgcaagcccaaccgagccccagaaccacttctgtctcttctttcggatatttcgttgttgcctcgacatctctgcaagacattaggaaaggaattcactcatcaattacatgattatttgcaatatactaccaactaatgtttctgatacaaagcagttaatggcaaaagatgtaaaaatattataactataacaatgcatttcatatcagtctgaatttagacaattgaaacctgacacctaggagattctacacaccaaagggaatatttcgacctttcaagttctgcagatcagcataagatatttactcactataatacattattcaccattataacttctaaatattgtatgggattaaggtcagaaaaagaagcattgtgattgacgaataatatacacataacatatgtactaattgcaaaaatcaatgtttaagttcaggatgagtaccgatagcctcttggtttctttgagacatctccctgtttgcagcttcatagtactggaccctatcggatagccttgcaatctcgaagttctttgctgcaatcttagtttccatatctgtctcaacttctgcacgagcaaatccccgtgcaatagcagcagccacaagttgtgaaacagttatttgttggcacaactcagctccaggatccatgcttgaatcatcagtgtcctcagctaaacttggaggtggaagtgtcaaggcaataagtgataggtgatcactcagcttcttccactccttttgccagttctcaagtgcttcctcagcttgcttccttctctcaatttccatcaacagactcaacctcatttcacgaaggtcatcatccatgcattgtgaagatcgagttgcaccatcactggatatttctgcaattgaaacaaagtgcactttgaataaaacagaagcattttcacagccattaagtacacaaaagcaaccaaagtgttaatgaagataatctctttcccagaacaacatggaaaatgatctttgagataatcatgggagtaaaagaatcaactcatagcccacacttagttaccgcaatgagtagacaatataatttttttgaacttttgaaagaaaaatgaaggattttttgcaatcgttatttcttgcctctgtcatatcacggaaaccttcgatttggaacggggagagatggctgagtggactaaagcggcggattgctaatccgttgtacaatttttttgtaccgagggttcgaatccctctctttccgccccctcagatcgtttgggactttcaaattggaaggaattctgacccccagattttctcgtagcacacatggttcaatgcttaaagaaaaaattgtgacccgaaatgaaagagataacaaattaacagaaagtcattaagttttgaaagctctaataactaagttgcacctgaaagctatgaaaaatgcttaactaaccaaactaagctgtgaaggcaattgttttcaaacccccaaaaggaacacctaaactgctgtaacaacaggacaggaggcatattgagaggtccatggtggtcatatactaaactaatgaaaaaaaaacatgttgagtagcacaacactgtggaacaaaactagtaattcattattggtacccttagaattaaatcacaatgattcatgaacccttccggagttctttgtttgcattaacaattcttttcactccacctgcaatctttttacccataaagtactctatagtactaagtaagcaggagcagtactagttctactagagaatccagttgaaacatgatgcgaagcatgctactacattgattaattggttatctttgtatcaccacaacagtctaagatgatctaaacacaaattaaaaggagcaaaacttagcattagaacacaggaattgttaccttcgaatgcatcataaaattctgcaccaggtgtgccaacagatgtcccaagaggggaactaggcttccaccaccgctcatgcccaccagcatcctccgcctcagagttactagccatgctcagtgaatcctgaagctcaaagaaggcatcattgttgattttccttggtgttccaccattggcaggccttccaacattgacaggcctcactgtcgcatcaggatttccatgctgaaactcgaactcagcctgatcatgcccatattcgcctgaaacagtgcccttgcccttctgtagcattccattctgccagtcgagggtctccaccacaccactgtcaccttcaagtacaccattgcttgcttgctgaaactcaaactcaggttcctgcgcttcaaaggattgacttcttttcggcaaaggaggcagcgtcacagagagcgtgggctgctggctaccatcactaccaacatccccctgggaaagtgtcttcaccaagcagggtcccctccttttatggttgatgaggtacggtgaccaggttcctgggaacgacgaaggcgaatccggcagtgatgtgctctcaggcgtggcgtacagcgtcgccgacgcagtctgcgctctcctgacaggagccaccggcacaggtatcggcttctcggcggccttctcctgaggaaggggaggagctggaggcggcttggaagcagccttctgggactgtgtagctgacccggtctccagtaacgggtccagcacgtagtgcgtgatggtcggcatggtgatgcggctgccggaatcagagggagatcaccggagatttcgacttcctggcatcaacggcggcgccctgaatcgcaattgacaaaacaaaggatgtcaggatgaatcaaattctcatcccagttgggaaggaaaacatgccaccgagattaggaatccgatccaaattattcgggaacatctccagcggaacacgtatgcaccctatccttcgaaaaagatgcagcgtaagatgcccaaaagcacctacaaatttttttatagaaaaaataaaaggagaaacgcacgacatttctccacctaaatctccaaaaaatcaaccatgaatccgcaaacgaagactcatgaatcgaacactcccctcaaaaaaaaattgaccaaaaaaaacacaaccaaatccgcctcgcagaattaatccgcccaaaccaacctcccgaacgaaccagcagctcctccagatcaggaggcgagatgccgcagccggcggcggctcgaatcaaacccctcctctctccagaaccagcacggccctcagaacaaaaataaaagataatttcgtccgggaacataccagccacctgcccccggcggcgcgcgcgcgcgcgtgcgatgcgagcggcgcctccacctcgcgcgggtcgcgtcgctgcgaggaaaccctagccgccgtgtcgcgccccccgccgccgccgccgtctcttcctcctatcgcgtttcgaattttatgtgcgggacacaacaaaaaaaataaataagcggcgcgagacgaaccagccgtgcacagctcgaggacgagggtcgagggggaagcgaaccctcaataaaaagagagagagagagaaagcaagctggcaattttttatttatttcctgcgatttactgcctggagcacacgaaaggaaacaaggaaaaaaaataaaagagcgagagccccgacacgatcccttgcgtacccagcacgatccgaccggtgggcccgggctgtcagcggcggcggtggcaccgcgccgtggtgcgcgaggactccactattcttggaagggaagaaagaggtgaaacgagtgggtacgggagaccgggggggaaaagcggcccgggtcggagtcagtcaggtctcgcggtcggacgccgggaagatggcgcgaggccgaggcgttttggttgggtggcggtgcgttgggttgggactactctgggttggtgggctcgttggttcggtggctccccgcaccgcaccgcgtgtgaccacgtgacgcgcgctgggcacgcggcgggtgcagcgtgggtggccgctcttttcgcgtgcgggaaatatccgagactccgagtcgctctggacaaatctgggccgttcgcggcggtgtccgtctcgggtgggtgggtgtggcagtgacgccaccgacgacgcaatcacgcgagccgagcccgattcgaggatctgctatgctacggtgtccttgtgcgacaagttctcgtagccgaggtgcattgactttgccaactcaggtgtaatttgactctgactctgtgaaagagagagggactacgagtagtataggagtagatgtttctgtgtaccgtacacggattacacgagcggttcgaatttacagcatcgtttctgtcatgaattcggagcaggcttgtaaattgcttgggatgacgaaatccgaggaggaagtgcttatctgcgatggtcttcttgccatggtgatgactgactgatgaggtcatgagccatgcatatgcatggatcgaggtgcattgacttttgactctgtgaaagagagatgaccggtgtaaattttacataattctgtgtaccgtacacagattgtagtagaagtgggtttgcgattctacatcctcgattgacctcttagggtgtgttcggacccaaggattcccaacccttctctattgtattccgcgcgcaagcttttcaaattgctaaacggtgtgtttttacaaaaagtttatatatgaaagttacttaagaaaattaaattaatctatttttgaaaaaaaatagcaaatacttaattaatcacacgctaatggaccactccattttccgtgttcactgttccggatgggaacgtgttctagcaaacacaaccttgagatgagatagaggagattgggaagatacgcaaaacgagatgagctattagcacatgattaattgactattaagtattttaaactttaaaaatggattaatatgattttttaaaataactttcctatagaattttttttgcaaaaaacacaccgtttagtagttcgggaagtgtgcgcgtagaaaacgaaacaaaactcactcacaaatcacaatcacctagaaagaacacagccttatttgtttacgatttgaccaatcctgcaaattgcatccgttacatgggccgactcgagttaggctaggcccaacaatagtcagtaacggtttcctccttgactccatgggctaaaataataagcccagccgcctcgtcggctgcggcccaactctcgccatcgcaaagtctcatcgccgcttcgccgcagcagccgccacgcccactcgacaccagtcatcacgcacgcctcgctccccgacgacgacctcctcctcctccgccgccgccgcctcggctcccctccgattcaccgcgatgtcggcggcgatctccggcgccagcctcgtcctctcctcgccccccgcgcccggggcccggccccagccgcgccccgcgcgggtgtcggtcgccgccgccgcgcccgccgcgcgacgcggggtcgttgccgccgcagcggtgtcgagccccgccgtgtcgtcctctgctggtaaagatggttagtgtttttctcgcgccgcattgaagtgttgtcgattgctcgttgagtcgttggggaactagcgtgtagtcaacttggtactgacagctagggttctcgtcttaaagaaaaaggaacagctagggttctggtgaggaatgtggtcttgttaaatcttgaatcgattcgatttttttcagtaagaaatcaaattttgtgatccgttgggggtggctatgaagattgattgattaattaaatgcgaatattttagtcctctttcttttggacatcaggcgttgggttgctccgggggatttggaatatagttgagggtggtgcaaaacgtggatgcaactatggtagctacagatgagaaatgattttgtgatgagagtcctcgagagatcacactggatatatgggtgatcaagcaagaatcggacagattttcctgtttgacaatgcaaagcaaaatctgttttctttccccttgatcctctcatcaatgtgatatttttcttgattggattccgtttctcatgaacttttaacaacaattatttgttaagatttttgtttttcaattattgtttacatggttggtagttagctgttttgtcctactacttttcccccctgaagatgcacatgtgcaaccaatttaactttgttttatttagaacatgatcgctcaatctatgatatgcaattttaatcctttgggcatcaataatgtttttattactgattcatgtgcagttcacttccttaattatgttgtcatatcatgcagccaaacagattcctaaggactttcttcatattgatgatttcgacaaggatacaatcatgaagatccttaatcgggctattgaggtcaaggcaatgataaagtcaggagacaggagcttccaacctttcaaagggaaatcaatggcaatgatatttgccaagccgtcaatgagaacccgtgtttcatttgagacaggattctttttgcttggtggccatgctatctacctgggtcctgatgatatccagatgggcaagcgtgaagagacccgtgatgttgctcgtgtgctttctggatataatgacatcattatggccagggtttttgctcaccaagtatgatcataaggccctggcttttctgtttgatctgtttaccggcacaatctacttgtacacagatacagaatttaccctacacataaaatctgcatgctccatactgcttagtgatcagagttaagataaaaatataggaacttctttggtgcttgggcacagttagttgtatactgggaattcggaaaatcattaaaattagagaaataaagcttcaataaagtatgaactttgacaaagtgtagttctataatcatctaagtgccaacatagaaatatttggattgatgtcttttctatacataaatgtatcttatcttcaaaattgatcatttactcaactttcacaatattttgcttgctttgtatgcttaactacagacatacttcacctttctatgttattcccattctgcacccatgcattgctcgtagaattcaactgaaggtgattccaccaagcattctcatatcttcctaacaacttatatgatcttgcaggacattttggacttggcaaagtatgcagctgtacctgtcataaatggccttacggactacaaccatccatgccagataatggctgatgcacttactatgctcgaacacattggtcgtattgaaaacactaaggtagatcatttattgcaccctaaggaaccaccatgtaatcttgctttagtatattatgactaattttcaacttttattgttatgaaggttgtctatgttggagacgggaacaatattgtccactcatggcttcgattggctgctttatttcctttacattttgtatgtgcctgtcctaagggcttcgagccagatgcaaagactgtggagatagccaggagtgctggtagtaagattgaaataacagatgaccctatggaagcagttaagggagcagatgttgtgtatacagatgtctgggccagcatgggccaaaaggaggaagctgaatatagaaaaaaagtgttccaaggattcacggttagaatacctccttttatgctcttgttccgatgttctgtctgcacaaactcattttacacataatatctcagtagtcctctccactattatctgcatatgggatctggctaatactttattctcaatactttgtttctttgttcctgcaggtggatgaagctatgatggagatggctgggccaaatgccttccttatgcattgtttgcctgcagagagagggatagaggtaacagacggcgccattgaagctcccaactcaatcgtattcccccaggctgagaacagaatgcacgcccagaatgctatcatgcttcacgtccttggtgcttagacctacagtcgtgtaccagttaaatgaatattgatatctgaatggcgatatcatttcggttttcgcagtttctccctgggggcaggagggtagagattttggagaagttcactatgttcagatgctttggattgtctgataatactattttgtacttttcgtggtagctgcttgtactgtaccaggtcggtaaatcctgaataaatggcgcacctttataatccatttccaaactgtgttaattttagatcttgttcagatttgacttgttcttatcagtctttacctctctcttgccttactctagtcacattttccaaaccgattgaagttatataatcttccatgtttgagaggagaagaaaggagaaaattgagaatatactcaaaacaagatgagctattagcgaataactaattaattaataattatttttaacttaaaaaataaattaatatgatttttttaaaaataatttcatataatttttttaaaaaaaacgatgcaccgtaactgtttgagtaacgtgcgcacgaagtacacagcctaaacgagccgagtccacgtctccatggctgcgatacgagtcctgagaagacgaccaacccaccatatttgacgtctccatggggctgtgatacgagtcgttactcgtgaccaccataatctttgacatctccaaggctgcggtacgagttcctcgagtcgcactcgcaacccaacatatttgaggctttgcaacaaattacgcatgtcagtcaaacagactagcgtcatactatcaggcaaggtaacgccgcatggcgctccaaaacagcaggtgcaaagcttctcagaaaacacaaggcagaatcagaatgcagtaaatcatgcttacacaggcagaatcacacgatttgtcaaaaaggattccaatgagcctttatgtaaatggttgatttctattaggtaaccgttcagcaaactgtcggtttgggcagcagagagttcagcaaaggggtcaggtgcttgggacccgagtatctgacatggcatacatggaaagaaaaggtgctgcttcttgtcttaacatgaatagtagaaggtatatatccccgaagtactggttttagaccatgtatgttaacatatgtcgtactattgatgagaaactgttcagtgaatcatgtagcctctgcagttgatcagctggagatcacttcctcaagctctcaatgatgtaggcgccgtagaggtccctgtggtgtaacaattgatagtttagtcagtggattgattgtgaagacgacaggataaagaatgaacatcaggttttgctgaagaattaacaagcaaaactcacattgagtacttgattgcgttgatggcatcttctgctgggagaaactcattgacagcaacttctttgttctcattcttcttgtctgtcaacaccacagaagtttaattatacagttctagtatctgcagtcaactatctacattataacatttggaaaaaggaagacatggatatagaataagaatatacagtcttcaaagaagcggcggatctcttgaaggcggtgaggggggatttccttgatgtccctgaagtggcggtattcagggtcatcagcacaaacagctatgatcttgtcatctttctcaccctgtttgcatcaaatgatcatgtgtaagaactcaagccattagatcataatcacttggtacagaataccattatttctttcttgtgttgggctactgactagtctaggtgaaatctcatctatcaatcaactcatactactgtttttctttcttttgtccagagagtaaaatcacatggatgatggatcaagggtactgttgtttttgtttcatttgttggcttagagaaatttcatgcaccaagcaataaagcatggaaaccttatctaacaaaagcaacttccatgtaaccaaggatggaggaatttcccctctctaaaaaaaaagcaaggacatgatgggatttaacctgatcaatcataggcatgagcccaatagcacgagctcgcaggaaacatccagggacaacttgttcctatcaggagagaaaaagaagcaatgttagagaaggtttgtatattttcttttaaaaaacacacacacatccatcagttacctgcatcaggacgaggacgtccatggggtcaccgtcctcacaaagtgtgcgtggaatgaaaccatagttgtgtgggtaaacaacagatgagtaaagaacacgatcaacctgaaacacaggtaaaattttcaagttctcttttgtcaatgttgaaaataagtcgtttattgcagcccctcgcattatccctgtcactaaccatcctactgttaatggcagtcataatgtttgccattttaaagttctgatcagaagaagcatgatttttgtaccatgaagtgctaattgatagtgccatttgatctcctcttacattttgagacaagatatggattcagtgcttatttcaaattgggagaatatgctcagtgctcataaagaccaaagattaacatgtagctggtacatgtaagaaatatatgcatttgcttgagtaaaattagtatgagctttaccttaattagaccagttgccttatccaactcatacttaaccttgctgcctctaggaatttcaaccacctgacaaaaaaatcatgcagtttcatagcatagaacttagcaataccccacaatccagctaaagaccaggcatactacaagaaagtggtctgcacgatcattgagtaacaattgatttgtggatataatcgagtgcagcagcttgatacatgtttaagcaaatgtgcaccagaaataggaaacacacggtcattactcaacagtcaacattgtcccagcatgtttcaataggagcaagcatttgaccccacaacaatacaatatacatagtactatataaagtgaagtttaggttgatgattccaaaagcctaaggaccaggcggtcagttcagacagttcggttcctatgacaccatgagagattccaactatgaaggtaaagagccagattgacattcaacccataaaatgacacaaatcatatttagagatttagtagtaaaggtaaacttacacagttgaaaactgctggagctcctggacctgcatttaagaggacaataggcatccaataagacaaatttggaacaagaaatcattcagagcacagaataattcaagcataagcaaggaaaagactgaacagaaaaaaatatattctgagtgaaacattgcaaggtacctatctccagatcgtgccatggatgagcagcaacatgtttttgagacatggaagaaaggatgcgctcgttgagagcagcaggggggtatcttgatcccagtggggcttttccatcagcttctccagccatggctatataaattataaatatgtcattgaaaagccaaaatgtattatctaaatcaaggatatggcaagcaaacaagatactctgtaaaaacaggttaaaaaagaagttaaaaagttatacccaaaccaggttctaaaaactactgggtaagttgtcaatattgtccatcacttattagatctaacaataagttgaatgattgaaccacctttttatgtgaagataagtttcacactgaggcttgactttcaaggatcgaccccatcataagaatgatagtaacaaaacataggtgctacaaagatattgacgatagcgctagtgaacaagctaactatgtaacattttgcctcacattacatgtaaaatatattgttcccaaacccatacaacacactacattaagataaagtactgcatacagttaactactaacttttcaaataaactactgcatatactgtaccctctaacagcacattctagcagacaaagtatgcacttatccagtaataacgtcgcttgcaatatgcatgatctcaaggaccaagtaaacctagaggttttggtttttcttgcaagacaaaatagtttacaaagaagttgaaaacagttacaaaaagggtacatatccaaaatctacacatcatctggtaaatgctgcgaacttaggatgcagagaagttccccttctaagtaacttcaacgccacatatacaaaaggcgattcgaaagtgcccttcaaagtaacttcgaaacaacactaagaaaaggttcactaaacaactgcaagtgaggctaatctaagcaacaggcaagaatagcggttagactactaatctatgcaagttacgagcagctgtcagaaggatcgtactaatatattgatcgagctagctgctagtacgaatttaataacaagaacttgaaaatgtgacatcatgtcctaagtgactccagatggagacaaggtgatgaacctagtcctggacaaaccatgcatcagattttttgtaaataaaaggaatcatccgcaactgcaggtgcgacaaagaacagctgctggcaagcagaagcatatcttagagaggaaacaatcacaacaacgagcagatggtagctgctggcaagcagaagcagatcttagaaaggaaactatcacaacaacgagcagatggggagtaaagctctgaaaacgaaagaatgccgctacatgtttggaaaactcatcaggagaagaaaacttgccccaaaaggaggaaaaagaacaccacgaaacgagaaataatctccactgaaaacaccacgaaacgagaactgatctccaccgcaaaacagatcgaaatagacacagacaacaaactaaaattcgcaaaaaaaaaacatcagcaagtttagacgtagtactagtagaagtagcatttagttccaagaacaccgaaatgtagcgaagacgaaggaaaaggcggaaaaattgggggaaatatcctgcgttgaaaaggaaagcgaaaccaacaaaaagaatattatcacgaactgcatagccgccatcagatgaagcacatgaaaaggtgttgaaaaaaaatccaaagtagaatgactcccgagactgcaccacgactcatcagagaacgaaacacacacaaaaaatacccaaaaaaaaaaacgaaaatccgcacaaaaagcagcggaagaacacaacacgccgagttggcgaaaaacccgctcgctctggcactgccacatacagtacacacagcagccgcaccgatcgtttccgagaaaccaaacaccacgagccgccacgaacaaccccaagcaaccacacacactacgcagcaaaccgtggaagaagaaccctcaccagcagcgagccgatgagaagatctcgctgcggcggaggaggagaatggctccaacaacaaccgcactgcacaactcatcacagaaacgagcaacccaaaaagaaaaatctgaaccaaagcagcggaagaacacacggcgagtttcacgcgctcactccactcatcacacacacacaaactcacaaacacgcacgagacgacgccgccacacagacaacccaaccaaaccgcaccacgcgcacacgcagcaaccgatcctactctaccggaggcgaggcgagggagagaaccctcaccggagcgagtcgatcaggagatctcgcgagagcggaggcggaggaggaggaggagaagcgaaacgaagaggacgacgctcgcgtccgcctgtcctgtctagtctcgattggtatctcggcgagggcctttttggcgatgcgaggaggggagatgggtaaagcccgagtaggcgtcctggggccaggcgccgccgcgtcgggggccgtcggatcggggatcggacggtggggatggatccacgtgtgggataacgctttagtggaagcagagagagatgggtgggggtggggccaggcgaggcgaggcgaaccagattctttcccacgaccacgagaggaagagaagggcatatactgggaatcgggatcacgagttcacgacgtagggtagacctcgtccactgtggaccatgctgtacagtggcacggggcacgtcggtcactgcgtcgcatcgcactagtaccagtactgtatcgtgtagtccacacgtatatatcgtgtacgcgtgatttcttttttttttttgttgttgttgttttttctttataaatggttttttgtaaatttttttaagtaagttttcgctttagactagtatcttttattgccggtgtttcgctttgagtcaccctccaaccaatgttttcattttaaacggggtaatttaccaatgtatcacttactatttttatctatttacatccaatttgtcatatatcaaagaaacggtctacatacaacaaaaaggtttattgacgaatagaaggtagcatattcgaggttgttcatatgcttgagaagaaagttgtggtggtccaaaatgaaacaaatgtaaaattactcgtcccaaagtgaaaacattaattaaaaggtgatgcaaagtgaaacatcagtaataaaatgtggcttaacgtgaaatttactctttttatttaaaaaaatacacgaaacgaaaaccagtgcacatattagaccttagggaaaacatattgaaatctcatttgtatgtgtaatatttatgagcatcaggatttcaccactaatgttttcctgtttattgtaatttctagtagcgtgaaaggtcataagtttctttttatgtcatttttcttttctaattttaaagtgccgatccattagaatgttgcaggtagaagtctgcaaattctaggagttaatgcactgttttctctttcagggagtgttatcttacttttttttaatggactcataaagtccccactttccagtgctacagtaattgtcctccactttatgactatagtaaaactgtcgcttgagtttttatttgagagattcaaaatattcaatgtgttcaaaacgatatcatgatcatgcaaatccaagataaggggcatttttatttgagagattcaaaatatttaatgtgttcaaaacgatatcatgatcatgcaaatccaagataagggataacagtgggacggagcggggctgggttggacaggaacgccccctccccctgttccccgcatccccccccccccccccccgcattggccaccgggtggaaaacctcacccgcctcagccgtcgtagggacgggaacgccccctcccccgctctccctgttccccgcattttccccccgcccccgcatcggccaccgggtggaaaacctcacccgccccagccgtcgcaggggacccggcaggtgagcggggcctcgtaactccagagcgagctccggtgatgacaacggcgtgcaagctccggcgcacaggtgggacggagggtgggcgctggggatgggacgggccggcagacagcgtcttcttgcagcagatggggattggggagggacggagggtggctaccagagcggcaatgagctggtcacacaatggtggcggggggacgcaggggcaagcatctcttgcggtccggcatctctcgtttgattgctcagtttctaatagcggttgtaccataaaaagaaacgttgggcattttttctggtcaaacacaaaaggtacgtacacttatttcttcccgtacgttacatttcgaagccagctatgcatggttcggttcgtcgactgtaccatacgtagcataagtccataatttggtttagatttgctttgctccggatcccacacttccaaaatgtaaacacgatcatactcgcaagaaacttcatttctacaaaaactgacacacaccgaagacatgctctcttttgtattacaccttcacaagaatactagactggtcgtgttgatctgactggcaaggtcttcctgtggatgctcatgaacttggcaacaaattctgcacgacaaaagaaaaaatgttatgttttaggtgctgtttttgggtaatccatagtgcaagtggcacttgcaaaagtataatgattgaatgcgattttttaacttttttgccctaaagaagaaacaattttcaaagattgaacatgatagtcaagagtggttcagaagacactgcacttcaagaagaaaacggtctttcaactggacttgaatataatactactctagaaactggaactacgatttttgttggagaataatgccagaagcaggatcaccagaaaaacatacactaacatagatggtactcagacaaggttaatactggaatacataaaagctggcaaattaccttccagtttcaacagtgcacttgcgccaacgggcaatctcttatcctggaattcaatgccaatacatgattatcatagaccatactattaatgcatgaaaacagaaacacagcagagcaaaactcacatagtaggcatgccaataataaacctccctctttatactagattggattcccttcagaaatagctctgcaagcttctgagaatgatcaagataaatgtcatttgcatggttacatgtgaaaagatgatagcatgcttgaagttaaatatacaattccagaaaaggaaactgccgtttgttttgcaatgattacctggagtattagtttaggaggtacaaattcaaccaagagtttctgaagcttgcctctcaccaaaaataacctacatggtgtttttcatgcattacataaaaagaattgcaaatatgtgatcacagttcaatcccacctttctgtatcgaatgtcagttaacaacgaaactcatgcactcggtgactgataaaagttgatacagtataaaagtatcggtagctaaacattcaatgactgttcttggctccaaatgtctaaccttttaggagaagggtcatccaatatttctgcagcaatttcctgcagaacattctcccatcctaatggtatagcttgtccatcaatgaaggggtaactggtaaacggaagggaagcaaaaacagaaaatagataatgggaatatagtgatataaataaaaaggaattaatactattcagaatagacaaatatggcaaccatacttgttggctttgcatgcctccaaggccaatattgcctccctcatgttttgcctagattgacttgcgatggtagcagcaaaacttgaaggaagatcaaaactttctttctttgatatgtaagtaagaatatccacaatctgataatcttttctatgttagtcggtgatgttatccaaataatggagtgaagcacgatgctgtgagcaagaaacctcacctcgcgtgtattgggtacaccaatgcaaataagcttgcaacggctcttcattgaatcgagaatatgggactcgtcctggcaagtcattaatatcttgtgtgtgtcagaggatgaatcaatcatccattttatcaaacgttgattactctcactaactttgtcaacatcatagagaacaattactgcaatcaacagataaaacaatcatgataggaaggcatcaaatgaaatggatttcaaataacaatgtttcagaggatggatatacctttgaatttctttctcacagatggatcggtggttttcttcttatttgtaatttcatttgccaaatccatcaaaacatatccagcattcttcgaataatacctcaaattaagctccatatggtgatcactagatgacaaagggacaagaacgggcatagatgtagaaccctgccaaaatcagggaaaccctttgctcattttaactcctaaaaatgatttttttttctgtgtggtggattctttttttcaaatatgaatgatcatgtgacacaaaaaaaagtcccagtcagcaaagggcaccatgttatgttgtaaattaagtagaaagtaatgcagcaggtcacatgatatgtcatatgcacatgttaaaattctagagcaatattgaatttcggtttttactcagccccaaagttgttgagatgtacgtagatacaaataagtaaccccgccacatagacaagttagatacagaccacaaacatcaacacagcacttcatctgtatttttactaaaattagctggcactattcactaatctagaaaccaaactatgggaaactaacttatacttcctaatttaaattatacacttcgatggcagcactaacctggccactgcagctcttcaagtagtgagaaacctgtgaaaaaacaacaaatacttaacgcaagctatgagtatacaatgacaaagtttttccttttttcagtctttaagtttgtacatttagagaggagtcaccaaagatctcagtaactacggctctgcacaatgaactctttcctgatcctggaggtcctttgaaaatgatatgcgggcaaaactcagtggagacctggtgcaacaaaacgctaaaatttagaagactaaatcactaactttgagcaacggggatgacaacatgtataaaagtatgaccatgcaactgctaagtagatccatgcttattagcaattcccaggactaatctagtcaggaggtagaatggacagttcgtccaataaaagataacaaggattacagatctataaaattatgtagttaagtgcctgaaagaggttaccaactgtttaagctgttcaatttgctccctgtgacaagtaaatccaccaagagttcttggacgatatttatcagcccagaaaagcctaatattttccacaacaagagccttctgaatgaaactcgattcagattcgtcggttgttttgctgttcggtgattttggttttcggcatgtctttccagtgacacatggaagccaagaatcattttgcgccttttgcatgttggaggtgaatttcatgactcctccaactaatttcccagtgaaatcactgaactttccactgtccccactatatctgccactattaaactggctactcaaagtggcgccactatttatttgagtgtgccgactagtaccatagttggaattcctaattgttcgtgaaaggcctgtctgggctgaaatagattttggtgtttgggctaaattattgctatttgcttcagtaccataattctcagcacgggcagtttctgaggtcaaggacttgtcattgttatgctttgttggtgttctctgaattggagccctacagtcacgagagaagatgtcacctgtaggtatggactctgtactcgtacatgcatactcattatatctggaattaggccacttgccattcgcaatcaactcattgatctcttgggaacaattttctgcatgtgaatcctctttgatattgtcagctgaatccatttccccctgtttggagataagattagtgccaaggaatgcaggagctctaggaggatgctccttctcatgaggccgtagctttggcgtggaaattgaccggttctgggaaaatttttccttgatagatgaccgactaaagctttccattgaaggccgaaatctgggaggtgttcggttgctcttcttgcgtaattcattcttcccaccactgtgtgaagaattttggtgcacttgttccgtgaaccttggaggagtacggctgtttctcaagtttgaagttttctcattaggatactctcttgtatggttaggagacaagttttgccttctagcaccaatttgggtattcctacctgatggcaacactgcatcattccaagggctttcgtgccactcagtttctgtgtccgaaggttcatagccactcttgtgctttgtggaagaatcattacgagaatgtcgattgtgtcctgagcttctctctgcagctaacattctcaatccctcaaacagttaaatgcttatgtggcttagaaaactataatcttgtaatatcaacagagcaaagaactatctctcgaacttcaaagcttctgtggctttgcaaactgcaattttggaatatcaatagaataaagtaaaaaagaatatgcaattttcaaaaattaattaagtaataaaacaaatcaagattcattatgatgtaacttaaaaacttaaatgaatataatgcaactaatacaaggattaagtaattcacttcgataatttcacttggcaacagagcttgtaaattaacaaacagagaacgatttagattgctatataaaagggaactttctgaacatgcaaaatacaaaatgagttcataactttatatgaacttacgttcactttattcagactcacagatcacagttaaatcaaaatgcagtgttgcacggatttcactcttccttcattcctacatggcattcttcagtattacgttactggattgctgtgggtcaatttgcttatatgatcttacaaatagtgttctggtgaaaatctggctgggagaaaatgtataaagcaacagatcaatgtggtctcagtatgaactagctgaaaaccctaaactttgtatattgaagcaaaatacctaactagctaactcctatacaggggaactacagttccagagatgcattactaaacaaatcacactccataaaatgaaagtggtaggatttgatcatttgaaaatggaatttaccaagtgtttataggttctaattagataaccgtagagtttccaaccctgtatagtaccctaacttagttctagagatttaaaccgcataagaaataatgaatctatagaatcaattttctgactcaaagtagataaccatctaatttccaatcctggatttgcgctctaccatgcttctacagacttaaactgtagagaaaataatggatttagaatcaaatatctgactgagttttgccaatatctcattcttaaggtgttgcagtttacagggtaaggaaatgggtgatgcaaattttgaatcaaataaatagacagatcaaggatgaatcaggaaaagttattacctgaaagagcagtatagtgttcttccaacatccacagttggagggccaaagggaggacaaaagcaagaactataaagagacaaataagaggacaaagacaagaaacacatatttcaattttatttttctgtgttggcatttttgtcttcttccttcactccaccaaggagagaagaaaccaaagaagaagagaggaaccatccattcttctccactccctaggctgctcactataaaaattgtcatctattccaaggaagctaaatatatccctaaaaggaggacatatgtagaatagaacctgtagctgtatgatcttgcatttatgccttacgtattgatccttcatcgacattttctcatcctgtcaatcttactgatgtcaataagcacagtatgcaacatctgctagatcttcacaaacatccaccatacataacgtattttctgaaggagtatgaataagttctgaggttcattactaaaagaccatgtcatgcacatgatcaaattttgccatattatcagcagattgttgagtcgatcttgaaactagaattttgtccactggttagtactccctccgtcccactcaataaggcacgcacgcattttaatatttaactatttaaatatttgaccaataaatattttattataaattaaatttcatttgatgaaaataatatcattggattgtgatttaaatttacttttatgtgattataattttgttgctacaaacattgtagtatatgagaaatttaaagtcaaagattagttttgaagattgtgtcaagtttgaccacgtcttaatgagtggggcagagggagtatgtcagttgcactaaagtcctaactgaataagcatattgaccttggtgattgcaaaaagagaaaaaaaaacagcatgcgctcttggaagagacatgttcagtattccaattaggccattagccttcaataattagttgaccatttatcaaatattcatgcctagagaatttattaaagtaagttatctaatgtccatgaagtttaattttgtattagttttgatagttagagaaatctacacaaaatcttagagccaaataattggcagggaacaaccaaaaaagatcatattattgaatgagattaattgaacatacaaactaagacttgattgtcattttgcaattctttcaaaataccatttaacagaagggtattgtttatgggcaagatacaagaataataaccttaagtccctagcaagttgaggtaggctagagatgaaaggtaatataactaatagaggtaggaatggtactagtacaggaaaaaacaaatatttaatattctaaaccaatttatctaaataaccatccactgtggtataatttacatgaggatacaattgagttccttcctttctcgagtcaatttcaaaatatgtttggtcacccttaataaatgttgaatatataaatatcaaatccatcttcaagggcaatggtgcatctgcaaatattaaaataggataaattagaatgaaagatatgaactatagaagaatagcaatacaaaagtaacccaaacatgaatcagccccattgctatctagcagatttcaaagttaatttgcaaccaacaaatagaaaggtttcaaaatttcttccaatttggtcagttccattctgtttaggaaggacttaggaacgaagcagtgtacatctacttttggtcaagcataagtgaatgtttgcaactcttttggtgaagtttacaaaaactaatcggataaattcaaaacaaaactgcaaaggtttgatcatgaaactgcaacagaaactactttcagaaacttggattagattatttcttatactgcaaccaaacgcaaaaaggtaaaagacttgataatgaaggaaataaccctaacagcaggacttttgcaaaaacaagtgaaacaatgtgactccaaagttatttacagttttacacaattaacgggttatggaaaccttcagtttggaagcacttatcacttaccttcaatgtttttcaggagttgttcttctgtgatatatatcttgttcaggaatttatttatttttttctcccagaggtcaaccaatttgttcattgagtagacatttcccgagggtctcagatacagcgtattgtttaatgtcctgggatcatctatggtgcagatcgtgaatttagcaacatcagtctcttcaacaaaaactcctgcaaagaatagttctccgttgaggttaaaaatacaaaatgtgaaagaacctctctttttcttttcaggaaccaaacaacagactggtgagaagctgagaagtaatatgcaaagacctctagtgtttccatcaccaaatatcttaacttcatctcttggaggagcatcgagtcctggctgaacaagtgacggaagcaaataacgcatcaagaagttgcagcagatgtaggtgtgaggaatgcattcgctctctattaaatggcgtatttcaattttcttctcatagaagccatggtccatgccacaaatttgaacctttgtgggatcaagtccatattccgctggaataaatctctgcaactcattgcaaaattaaaagtgatgcttacattttcataatgcagtaatggtcaattggtcatagtgcagaatcaagtaataagacttacgctctggaggttgtccaacaaactactaacatgagtagaactggacatgataatgtcaaaactaacaagcctaccaaaggataggcatttttctaagcgtatttcagttgttagttgtctacactgcagtgccacctacgttttggattttttttccctccattatttttcaataagatggaacggaattaaaactttgtcgatatcagtgtcacatttcgtttcaccctccattccttagttttgtcatttttactagtgcatttttcctaaacttctaatcaactgttctcgagaataaacagccaacatcatgtgacaatgcgacatattccgatatcaaaacaatccgtttatccgagcaaccatgagttgtgagctcaccttcacgcacccagcatccttaatagcccgaatcagaagcttctgctcgagcgcttgcttcgtgggcacggcgcagatgacgacatccacctgccgcaccgcttccagcaggctcgggtaatcttcgagcgatccctaaaccacaactccacaagttcaggcattggaaaaccgacgtcgatcgaagagattccccatctatcggcaggtggaagggtgggggcctggggggctcgcggaatgccgcgctggttgttaccttcacgaccgtggcgccggcgagcgacgtgagtggggcggagtcggggacagcgaggtggtgggggcggacgagcgcgaaggtggggtggccggcggcgaggctggcgcgcacgaggcatcccccgagccgcccggtggcgccgaccaccagcaccctgctccgcgtcgcctcctcgcacatcgccgccgacgccacttgataagatctagagcgttcggatagattaagaaaaaaaaaagaggaaaaatgatgccaataagtaggagggtgtgggcgtgtggctaactggcaagtaatgttggaccgttgatttggatcgaacggctcgctgcaaagttcgcacatatacaaatatatatggttggtatggtttgaggcctaaattaggcttactaatatttgacaatttcaatagtgtttagtgtctatttattttgaagccaaaatttggcatgtctaagaaaataggccatttcaatagtgaacttaggttattttgccctcaatccaaacacaactctgccttaccaaaattagtcatgccaaaacttaccaaaatttggtattgacaaaatttggtaaggcctatttaggccacaaatcaaaccaacccataatcaccatacatcttttgtacccgttgattgattcccagcatttacaacatggtagtaatttttacctttggattttagataatggaagttaattaattgtgtctaccccagcttcagcataaaatgcacgcaacccaaaaaaaagagactactaaaacctcatctaagtacagaaggtttgaaagaaacatgaagattattggctatggcctatcaaacgcagaccagaccgccgctatgctcatccggtaaaaaaactctcatgccatctagtctaactgtcgtgatagcacaacaatagtatcatataatcccagtttgtaaagggtatataactaaagtaataacatgcaaaggagaatataccaccttatcattaaaaaataactccatttctgcttagccaaatggactaacaaagagttgttgcacctatcaaaagcagatttctcatatatgtacacatgaaagccaactctaagcatatactaagtaacattgcaagttggttataaattactagaaaccatataaattgcagaccataccaaaaagagataaacgacattggacgaacaaatgatggatggtttcatcctcgtgacaaaaacaaaagtcttacaatcttttcattttcacttagttagattacccatggtaagaattactccccgacataaaaaacaaaggaaaatcttgacctctaaaggtacttttatctttgaaatgtgtcttgatatttgggaccccgatataaactagagctaagtagcggaccaaaaagaccctattggggcgaggtttcaacttaacacatattacattcatgtatcaaaaccaaatcagctacgtgagggaataaattatgccatgcagctaattttacaccaattagatccctcgccatgaaaagctaggtaggttggtttggaaaatcagagaaatagttgactgtttatgtcttactatgttacagggacaacgataccgatctctcaacaaggtattacctaaccacttatctttccaaaatcttatttgagagctgtccttaatacgaaatgatccaaaccggaaaattcatatttgaccttcatgaggctaacctgaaaataagagtcacccgctttccaataagtccgagataaaggttacgattacaaatatttattatatagtatatgttgccacggtccatcggtaataataaataatttatataatcacttgctaagtaacgctacattctttaccttgaggttatgaattgaagcttccggtttgaattttgtctaatttcgagcggatctcgcatggcaacgagggatttctcaaaaaaaaaaaagttcgtcagctaggtaacaaacaccccaacactatacatagatcactataaactaaaatcactactagtaaattatttatcatttttaactagcttataggagtacacttgaacatcgcattgtttctcttccaggtttattgttgatcacacggattggagagcgggctccggctgatccgccggcttgccggcgtcgagggaggcgagccactcgagcagcgccccgttgaactgctccggcgcctcgtcgtgggggcaatggccggcctggaggttgacgacggtggtgtcctggtagaacttcttgatctgcgccgccttcgccggcccgacccacgggtcgaggtccccccacagcagcagcagcgggcacgacagcttgcccagcagcctgtccagcgtgtaccggctctggttcgccatgaaccgcgacatcagcctgtagtacacctcgccggcgttcgggtccgccgtcggcgccgtgatggacccgatcaggtattcgtcgacgttggtcgcatccttgtacacctgcgcgacgagcagcagccagcaagtcagcagcaaacggagcaaaagcaatggcgcgaaggtgttcgtcacgacgacggttcaggttgcttacgctcttgaggaccttctcgaccctcgccggctgcttggcctgccagaagaggaacccgagcacgacgcgctggaacgcctccttgagcggcctcacgacgagcctggtcaccgcgctctcctcccccgccgccgcctccgccgcctcgggcgggcggttggggtcgccgaactgtccggcggagttgagcagcacgacgccacggaccagctccggcacctcggtcgccgcgaacagcgtcgtgaagccgccgaggctgttgccgacgatgacggccgggtccttgacgacgtcccggaggaagtcgcggacctgctccatccagatggtggcctcgtactccaccagcgccttctcgctccagccgaatccgagcaggtcaatggcgtacaccttgtacttcttggccagctctggtatattgtacctgaaaattttcagaaaattggcaccaaaatttcagcgtgtgttagttcacattcagctagctgattagccaaatgctctgccatggtgctatctacagttaatcactgtcctatcagtaagacagtttttttcatgaacgtataaaaggattatacacgttaatatattagaagaaaaatatttttttacacaacgcaattagtcaaaccggcttatataaggaaagagaaaaaaaagcaaaacaaaaaactgaagcttaggaacaactacgacggctaaacgtaactcctaacaacgggaaaggggcaaagccgccgtacacttatcagtaagacagtaactagtctgcatattgcatagtccctaaactggggagatggtaatggttatacgacaagcaactgaaccaaaatgattctaacctccaatggaacgcggaggcgccgaatccgtggatgagcacgatgggctggccagcgccttgctcgacgtaatgtatccggcgacccctccatgtccagaagttgtatccatcagccttgaacggcaacctctccaatgctacaaaaacaaaccgatcgagcaaaatgaacttaaccgcaatcgcgttttcgcagctcagacctcagagcatcgattggtcgtttaccataacacaagaatcgattgctaagtgctagtactacttaccttgggcagagctgttggaggaggagagcatagagcagcagacggagagggtgacccccttggtcacgaggtccctcctctgcatcatcaccagcttgcctcctcctcgtaccaagaaatcaaaaaaagccgcccgcaaggtaaaataaaatacaaataaaaatggaaaaaaataaaaaatgaaccaagatgcggtaccttcgagggcggtctgcggggagccgcggtggcggcggcgcgcggaggcggtcgggagggcggccgcgcacgcgaccgacattggcggcgcagcagcagcggtggcggcagcggcgggattcttggagaagaagacgagaggcagagagcttggtaattcgttggggacaagcgccaagctttgtataggtttccgcagtgaaatttgtgtgggcggcgggcaatcgggcagccgtggcagcgtccgggccaaaggagttcgagagggagacagagatcgacggaggcaagcgactctctcccgtcaaagagttcggtggggaggtgtggcgggtgaggccaccaggcaatgggcctcctgattgtgattagcgtgtggaacctgggctcattgactggctgggccggcctggtctgcgcgctgcttaaagatgctactgctacttcctccgtttcataatgtaagccattttagcattgtccacatatgtctagattcattaacatctatgattatgggcaatgctaaaatgtatatctagattcattaacatctatataaatgtaggcaatgctagaatgacttacattatgaaacggagggagtacgtacaagtagtactaataaatcatcatccaatacttctgacttgagattctttgacatatgtctaagattggtgccctgtttacaaaaaattcaatctacagcaaaaatagtataaaaatttttcccttccgaccagaaaaatgtctcttttcttcgattcgtagcacttttgtcacattcactcctctaggtcgattgtttggccaagattagggatgtgaacatatgaatttgtcctttatccaaccaaaaaagaacttgggataccgttgtacgctctaccgcttcacttgtgactttcatgcagtgaactccggcgtgggtgcaagtgggcttcgatgaggtatggtgtgagagtgtcgacgcccatgagcgtgagagtgaagggcgagtaggcgggagatgctaggagggacatgcgaaggatggtgagcatggagaggcgaggggaacaccggacgcggagtcgaagagggagacgttggtgtggacgaaggaaaggcgttggaagttggtgggggatgaggtgactgccttgagagcgaggggtgctcgctccgagagggtataaggaggagggaggcgaagtgcgaagggcgttgttgggagcgggaaggaggcgtggtgcgggtagtgggtgccgatggagaaggtggggagggcagcatgaaggtgagagatcagggagacctggatcccctaccaccacgcgtcatcatgtcgacggctatccttgatcttcttgtgatatcaacacaagccaggtacaacctaaccaagtcaccgtgctatacaaggcggaacatgcgcatgcaaattagtttttctccatcccgactcacatgcatgaacggtaaatatgacgggtgctacgaattgaagaaaagccaataacatgtgcttctagttaaaaagggagagtttttgtactaattttttttaccaacatatttttgctattgtttgctaaaaaattgttggtctagccttttttagaccattaaaaaaccgtcacaagtttataaggtgtaaaactctcgaatacaactagaaaagttggttcttcctatatagttggtacccgctagagaagttatttgctataaagtttacaccatgttgcgccatgtcatctttttttcctgagccgttggattgtctgcaagtatccggatggacgttacatcgacattgaacagttttgggccagcccatgctactcatgggcctctgttacgctacacatttttcccattggcccaacgataccaaccatatccattcctcccacagaacattcccaaattcatttacgaaaacattgataatacaatctgttaactgcaatttgtactttggctagcccgtgattgttaatgggtaagattattgcataatctttctaacctccatgcatcctgttttgactgttaatgactgatttcttagtgggatttacaatatttgataaacatatcatagttttgcaactatattatatacgaacatcatgcagtaacgcgcgaggtatcatctagttaatactaatgctataactattgtcttgtacactttaaaagttacaatgagttataatataattatactataactatatactccctccgtttcacaatgtaagtcattctagcattccccatattcatattgatgtcaatgaatctagacatatataatgtcaatgtaggaaatactaggataacttacactgtgaaatggaggaagtagttatggtgtaattacattataatttattgaaagttcttcaccaataaaactagcggcaactcttagcaattcctacttttctttcctcgattacatgtgagacacacagctacggatgcacaccactctcatattgtcgtagaggcataaatgtgttttcctacacaggttcaaagaaacaaaaggtcagcggtatatcactatatccctgacttgtgataacttatgcagtagctaattttttttatggtccatagcagtttgcaggaaaccaatatttgagaagtgaagggaaagaaatacaaggagaattcgctcgacttctcaaagatgacagcaacaaagagggttgagttatcttcctacggaactgagatcaacgtaatctattcatgtgttccaaacaaactttttgtgggataaaagttataaggattccatccacggaggaccattgaactcctaaatggacttttcagagttcttattcttacgttttcttacgttcagaatctattcgtgcacttgctactacttcattttctactcctgccatcctgtgtgttcctcagagaatccctaattcctacccccgaatcgtgtgattcagcgtgcgtgcgtgactgcgcttgtcaacaaaactgatgctaatactagtattcagtcaagaatctgcagaactccgtgctcgctgctcatgattccattcgcaactggagcttgaaaaggaggggcaactacgcgcgcaacgcgaagccgttgcttggagtattttacttccgcatgggcaattactccgcatctgagagcgcgccaattaaccgcatttcaaaacagcacacacacaaaggctgaccaggtcgtccaagtccagtgactgactggtgggcccggatctggcagggccccagttgtcagccacgtggatggcatatagggcaaacacgattgaaaacagcattagcaattggggagtttaatatatgcagccttgggggatctctagtatagtgcagagaccttttttgttttgcaaccttttctgaactaaacaagcaaaagaaaagacatcgataaaagggtgtgattagaatatagctactgggctactgtctgcgtcctctgaaagaggaaaatggtggtcatcaactctcatcattcatcattgtggattacagggaccagcggtcctctcttaatctggtccgctttgcgaaatagattagctatcgggcgtgtattctctctgtcaatttggtatattgttccatcaattgcttaatgaggataccgaagataaaatgacaaattggtgttcctcccattgggaaataccccaaaatgatcgtgcggatatttttaacctttttctactgatgacgtagaaaaactctgtatcattaggcattcaactaagccaaaataatttggcaatttcaatttttgttggtacaaaccaaacatatgactatttttggtagtacgaaattaatttttggcttgattaagtttgactaaaaccaaacttaccatctatttttttccatattcctatattttcacaatcccacatctagggagcctacatagtctactttctgaactaggggagtatgattttcactttcattcctatagttttttcctccatcttaattaaattggatgatctccttcggtcccgacaatccctacaatttttatttttgaagcaagagaaaaatatgctttaagttatgcaacctcgacagttctgcgtgcaagaatttctaactgttgtttgactcgtatgcgactaaaaacaggaagtaaacatggagatgcaatgatacatgcttaccatcgatagcaactatagtttatgatcggaaggggcacaaacaacaaattgtggattttgggttcaggacaaagggatggggaggtagttccaagagaaaatagccagctgcatgtattgtgatatgaaattaagcattcgaccagtctaggtgatttgatactttgatgtatatgtttatttttattctctctctctgtctgaataactggaaagcaatggactgcatatgtttccaaggtgttgttctgacacagaaattacatgacttgtgaaacatccatatacgttccatgctttaagaatggcgctttgtgcctatccatttcagagctctctgttcacaaatttgaaacttcaattcctgatgatttgtgacattatatataggtaaaaaacaagaactccatcagagtagtagtagttcactgaaactgttgctcctgaaattcaaaacaactccagagaagaaaaaaaaccttcagaagttcagatcaaaacgctcacgtggtgccaccaacatctctatatatctgtacgtcgctcggtcaaaaagggcagggaaaagaaggaagaaactcaggccatgattgagagccccatgatatgcgaactccgaaatatatttggagatcatggaccatgatgtatattgatgttattcgtcgagaaatgacggtaactggggtccttttgacgaacctttttctcccttgttcatactgcatttgccaattgcagctgtgtcccagttgatcattcttttcttgcgagaaccagagatgacgccggaacatggagagttggaccccttggcgtccggatggaggcgaggaaatgtggtgtaggtgtggtctccacgtacgccctcccacatgaatataagatgagatgtaatgaatgccttgaatggattgcaagaggggggcgatgcaatgcaatgcaatcatgccaatgtgccaatggcaatggcaaccaacaagcagctgtcaccctcatgaagggggtgcaagtatatatgcaatgcaattatgtgtgggatcaatgcaactgatcatctgattctgtgctgattaatcagaagaagaaaaacctcccactcttctatagttcttgattgaccattgccactgtttatttggtatgaatctgagaaagttagatcacatgggcatgcaccttgggaaatctatatatgaagtgatgactaatgctagagtgattgggtccaatttaggatttaagaggaatacatgtaggattcaaaaatatttttttggacagaatgaattcattgaacctcctctagcatttgggagggtaaattcagtgaacatagcaatatccaatctcaaaagttcagatgagccaccatactgtcaagcatgggttcatggatctgccgcaatgatgtggaatgttcgtaatccagaatctaaggaggtaatttacaaaaagcacactatgttggaaattgccctgcactttatataagcctttaaacgatctctcaccatatgcttctgcttctcatcactggaacttaccgacacaaaaatataaaagcatgttctttcaatcgaagataaatgtttctccactttctccacttccaggacagggtagatgccacaaacacacgtggtcaccatgcaatccatctcaattctcaacaacatttcgtcacaatgaaatacatgcatttgttctctctccaatgaagtagtgctcctttttcatactaggacttttgtagaatcacaattcttgtggggaaaagaaaaatcctatgacattcttttgaaacaaaggaacatgattgtaaaatccataaggattgatttcctataccctcattccattaaaaatcaagtccaatacatagcacatacttcctccgtttcacaatgtaagtcgttctagcatttcccatattcatattgatattaatgaatctagataaatatatatgtctagatttattagcatcaatatgaatatggaaaatgttagaatgacttacattttgaaatggagggagtatatgataatccgttgcgttttgagaatccttcattctagagatttttctttaaatttttagagaatgatattttttacccgtttatatgtaattgaatataagcaaccttttaaattgggaacttggtctctcaaacaacccaatctaaaattttatcctacaaatatttaaacttactatcacggggtggtattcatgtcattgcaacaaacatacccaagcggaataattaagggttggtttggtttgaggcctaaattaggctttccaatatttgacaatttcaatagtgtttagtgcctatttgttttgaagtcaaaatttggcatgcctaagaaaataggccatttcaatagtgaacttaggctattttggcttcaatccaaacacaactctgccttaccaaaattagtcatgccaaaacttactaaaatttagcattgataaaatttggtaaggcctattttaggccacaaaccaaaccaaccctaactatttgccagcctttcgcattttcgttctaaagatttccgtaatttttttcacggcataaattggctagctctgaacccctcaaatctctcaacaacttttcatctctcatgctttggccatccattccacgactaaagtttaagagatctttctaacataataaaaagtgccttttttatatcatggtaggaggagtaacttgccggccagcaatcccattctcagtttctcaccacatcacttcacaccacaccaagcagcagctcaactgcaaggccagaaagaacaggagcgctccaccggtagatatgagtagagtagcagtagtactagagtggtagttgcgcaattgtgctgtggtatacacactctccgcgttctggtctggcataggattcttgttgggccgctgttgagttttgggggccgctactgcaagtagccaagtacgcaccggaaaaaaaatttaacgccttgaaaagtgaaaacccagaggaggagaagaaaaaaaaaggaaaaaagaattcccaacaaaagctgcccccaccgggctaaaaaaatcggctcagccttttttttttccctttcttcaatcccttttatcctcttgcctaatagaaacccacacacaaacacacatgaattcgcaggagcttgcagggtggtgagagaggaaggggagagtgagagagacaaagcataaaggcgaggagctggatgccgtgaagaaatctttagcctgagagagagggagagtgagagaagaagaagggagggtgattgctctgatctggagctggttggggggaaaggagttgggagaatctcatgggagctgtgatgaaatgggggaggagaagctccttgatccgttcttgagccgggaaatttgatctttttaagctgcggggttggggggaaatttggatcttgaggctacccgagcgcgaagcctggtttcttccggtgctccgttgctgcattgccttgttgcccccagatccgagctgccgtgcgagggaaactcggatctttgcttgcgctctccccaaatccgcccaaaatttgggctctggagcaagctgtgttcgtggtagccccccgtgcttcaaatccttttcagaaagttcatttgtttagttgggggttagatatggcagtgatgcggactactttatgaggtgtctcctgccatttttttttagagtagattcgtcagtaatggcggatcttgccatggagtagtagtagtagtagtagtagtagtagtagcagggggttccttcggtgatagcgaagggtgcttagccattaagcggcggcgatgtctctgaagagcattgtgcgggagctgagggagatgagggacggcatcggcagcatgtcgaggcgagccgctgacgggcgcgccggcggcgggcgcggcggctcgcggcattcttggccggtcctgtggtcggagcagcagcagccgccgcagcagcagcagctgcagcgtcaggagcatcagcagcagcaggggcggtgggcgaacctgccgccggagctgctgctggacgtgatccagagggtggaggccagcgaggcgacgtggccggcgcggcggcaggtggtggcgtgcgccgccgtctgccgctcgtggcgcgaggtcaccaaggaggtggtgaagacgctcgaggagtgcggcaggatcaccttccccatctccctcaagcaggtaacaaagcttctccgtctctccatgccggtgatagtttggatttctccatggttaactttgtggattgctgcagccggggcctcgtgagcatccagtgcagtgctttgtgaggagggacagggcgacttccacctatctcctctacctggggctcagcccatgtaagttaaatttacatctctgtttttggttgttgacaaaatatatggcttacaaatcttgttctactaccaatttataagagtatcatgtaccatcagtccatcagtattcagtactagtccagttcatctgcatcaagatgtgttgtttctgccatttgcaacagtgaaaaaccagaataagctgtttgaatgagttactaccattgttaattcggtttaccgaaatctgtgtcaggtaatgaattgtgttccttaaggctaaggttaggggaatgcaatctgctatgggtgtttcatatgcatagcaaattttcattatttacacgagcagatgttttctagtgcctgcatgtatatgaagattttgtttgtcctgcctgtctttgagcgctacattatgcaaaaattcaaccgcggaggagtactcagtgacaagaaaagataatgttcgccttttccgatcacatcagctgaactggttgctcctccagatcgagaaggaaaccaactgtgactaataaacatagagcctgtaaaggttgtttcaacgcacttggctacctcattaacacaagtctttgtagcgtagcaaatgtacaagatcctaagctgaacctaaccgttgaacgtgcggtgctttactattttccggaataggttagacaatatgtgcaggcaatccatgatatgcatgccattctgcagattcctattcactctagatgcataaatatctacttctaacccccctatctaccaggctgtgggtgcagtccacaacaaacttggtacgtatgctgtttagtacttcctctgtcccaaaatataagaacctaggatcgtgtccagattcgtagtactaggaaatgtctcatccgattcgaagttcttatattttgggacggagggagtaggatgtattataagggctaaatagctcatctcctgttttgaaaatttgaatagagctaatatggaactcagaatacggacaattaatgttgactacatcactaactattattctatttatgaatgcagctctacatggagaaaacgacaagcttttgcttgcagcacgcaagattaggcgtgcgaccaggacttcttttgtgatctcactggtctccaatgacttctctctatccagtagcacctatgttggtaaactgaagtaagcactttataatgttgactttaagtaatttggttattctcttacttctagaaagctcactcaaatttattcccctgtatcagaccaaacttccttggcacaaagtttacaatctttgacagccagcctccttgcgatgctgtagtgttgccaaacaaccgaccaagcaaacgacatttcaagcaagtatcaccgcgattgccactaggcaattacaatgttgctacggtctcatatgagctcactgtcctacgtaatcgaggaccaaggagaatgcaatgcaccatgcactctataccggcattgtgtattcaggaaggtgggaaggccccaacccctaccggcatcatccactcacttgacgaacaagttcccgccttatcaactagcaaaggaaaggaaccagccatagaattttcatcgacaagcctcagcgctgatttgtctggaccggtctgtacaaatgaagtgcctcttgttctgaagaacaaagctccccgctggcatgagcagctgcagtgctggtgcctcaacttccgagggcgtgttacagtagcatcagtcaagaacttccagctcgttgcctcagttgatccttcccttggtatccctgcggcagagcaggagaaggtcatcctccaatttgggaaaatcggaaaggatatattcacaatggattataggtacccgctctcggcgttccaggcatttgcgatctgcctgactagctttgacaccaaaccggcgtgcgaataactgaagaaaggtatcaaacctgtgtcttctctctatttagctcaggcagcgtctgattccgttggatgctgtaaaattctcggtcttgctatgccaaaatgagcctactcctgggggagacagtagctttgtcagatcaagatgaacaatggcatctatatcttggcaactggcaaaaccccaggaaagatttgagtgacaatgctgtaaccaacaaactgctattgtactattgttcttggaatgtttagcggtgaaatatcactgcgctatggataatatggacgctgttcatcgtgccctacctccttccttgatgctatttacagtgaggttggcgattatgatgctaattaaggagtatctcctgtgatccatcatttgagcctgttacagttacaattactcctgcagaatcatcagtagaaagttaaactctgcaatcatcgtcagtttcggccctgtttagatttcggctgtgtttaggctgtgtttagttcagcgcaaagtttggattttggttgaaattggagatgatgtgactgaaaagttgtgtgtgtatgacatgttgatgtgatggaaaataactgaagtttggatccaaactttggatctaaacacagctagatccaaacttccaattttttttatcacatcaacctgtcatacacacacaacttttcagtcacatcgtaccaatttcaacccaaacttccaactttggaaagaactaaacacagcctttaacttttattcttcgaacttctaactttttctacatacacaaactttcaacttttttgtcacatcgttctaatttcttctaacttttaattttagcgtggaactaaacacacagccagaatgcatattggcagtaaactgttgcttgacactgcctcgtcgtctgttcgtcgccggcgggcggtggcggcggcggcggcggctaaccgagcggtggctgaatcttctcttcctggtcaaaggccggcgactggctgcacgtctgcacgcgcggtgggggccagccgccagcgcaacggccgccggccgtccgcgtcagccggcaacatctgcggcccgtggccgcgctcttcacgtggcgtggcgaccctatccatggtccatcatctccttcctactcgtacacgctaggctttgccgctgcaccaagcatctcccagctccgaagtccatgtcgccatgacgtcaccacatggcacggtagcatacggaacagtggacgacgacgacggcgacctccaagcatctccgatgtccatgtcgtcgtgacgtcaccacacggtgagttggtgacatacggaagggaggaagacgagagtagacgacgacctctgtacaggccggccttctagaagcagcgctatgtactgtattccttttcttccataaaaaaaactaacttttgatcctgagtttgaaatcaaactccttagtccttaaaaaaagtttatgtatctgaatatgctgatatccaactaaaatcctttaggcatgtaattacgattggaaataagaagttggttttttattaatggctgagggactactgtatttgcgcacgtgaccttctagaaggtgagacctgcacaagaggtgaaatccgaacgttcaaacaggaaggacaagtccagtctacagagtcacgcgcacacgaaaccccgggagttaatgcggcagcggaaaccggaaagtgcccgatatatacggggattcgcgcgcggcgccgatctgacgcgtcgtcatcaacgattgctagatagccaaagctcttttgttgtttcggtgctcttcggcttcgtcgtcggcgagggagggtttggtttgggaagttgggggggatggatcggtcgatggagacggtggaggaggaggtggaggagtacagctggagggaggtgctgctgccgcggctcgtcccggtggtgtcggacgcggcgccggagctggagcgggagacgggggagcgccgccggggcagggagctcctcgtcgccgtcgacttcgggcccaactccaagcacgccttcgactgggcgctcgtgcacttcgcccgcatggccgacacgctccacctcgtccacgccgtctccagttgagcaccctccccatcaccatccccatccccgtccgttcacctccgaacttacctagccttgtggagcatatatgcatctagtactttaattagcttccggaattttaaatcatatactaggttgatgattaagtaatttattgtaattgctcaagcgaatttagcaacttgatttgtttagtgcacacaacccagtcgtcgtgtatggattaattaatcagaagtatctgcatctcatttgtcatttggctgctagctcactgcacctttttttttttcagatttgaatcaccatacaaatatacatagaatgtgatagcagcagcccaggcagcgagcctatataattttcagtaggctagttaattgtgatacttgtaaccctttttatcttctatcttaataacattcggattggcctttcttcggtcatcctagcaagatacaatgcagcatcaccgtgttgtgtcattgtttactgttggatgaacctatatagaggcctgacttccaggaggtcaaatttatgatggacttagaagtggacttccgtttgatgatctagttcattagagaagtgaaagcagtacccccagctcaacagcttaatgtcgatcttgtaaccgctttgtaacctccttttcttaataagatttggtcagcctaatccttcggctgacccgttaaaaaaggttaaaacagtactgtagtttgagagactaagggaatagtagcacttgggtattgtaactttctaagtttgaagattgtgggttgttttcctggtgtattatcatagaaccagttctataatcgaggtacatctggtaaattgtttgagatcactcgagcttccggaatttgtatgttgaatagaagacagttggtcactcggtcttatagtctacattctgaaagaaatttaagttgctacttattgacacatgtttccttatcaattttttggatgattgaaaatcaggctgattgcgtagtgcataatttgtgtaggtgtcaataatgatctagtatatgagaaaagtcaggaactcatggaggatttagccattgaggcattgaagacatcactggtatgctttgttcctcccatgcatatattattttgttgcacaaagaagcacccaatggttatccttaatggttcatttacatgcctgatgcctaatctgttgccctataaatctatatacataatgctatgggtggatttttgatgaaaactttggaaccactttcttgtttgctgaggatcaaattttctcttctgatatatgcatgttctttttattggggattttaccaggtccggaccaaggcaaggattgttgaaggggatgctggaaaggttatttgccgagaggcagagcggctaaagcctgcagcagtcattctgggcactcgtggaagaggtctaattcagaggtatcagactcttaaactgcagtccagttccaactgtctaaattttagataatcttaggacctgataaattggtttgtagacctgataaaagatcacgaccttggccaactttgtgagtagcaatttttctggtaaatagtataccatcaggatgagattaatatcatgggcaacccatggaacttgtcattctaaagcccttctttttatgttcttctaattacagcccctatttgaaatattgggatgattatgtagtgaaccataaaatctgttcactaatatcttgagctgtgaacgctaaaatctgctcactaatccatcatctaaaagtgctactcacaaaggactaactttaactttcatgttctgatattgtgttttaatagaataaccactgacattaatggaagaggtatttcaactctagggagcataataatcaattgattttactcagaataatcttgtgagtattcttgtaaaaaatcaccaccaatggtgtcatgcattggtattgcgtgtatgtgggtctttgtttgcaaaattttcaaaaatcagaattatatgcatcgtttcaaggagtagatcttgcaaaaataggcaaataaatctagcatcctttttacctttaccttttgatgtaaagaaactccactgatgttcatatgtaatagaacttctgcttttcacatttgctgtgaagtgctaagcccatgttctaattcgatgattgaagaaggctggcatgattgctagtgaaaccacaacttatagctttactaggaattgtagtgagatgtgcttcaactaatgcattaaaggaacatcagctagagtagtagggtgcccctcaagagaagatatgataatttaacgagttgatctgaaatacagtcaatccttgaccctcgtgcaaatttctgctgaatattatttttgtcccttctttctttcaaccttttgatgcatggtcatatttcattcttgcacatgagttgcggatgacatttcaactccatctctaacttcgcctttatactgtagtgtgttgcagggaagtgtcagtgaatattgcttccacaactgtaaagcagccccagttatcattgttccaggcaaaggttagttcaagatcttaacttttcacaaaataattagggagtacaggttcttagctgcagataagatcaagaagaaattagttacgtttggataacaagaaaataattttacattttctctacgattttgcattgtaaagaacctaatctttttatctgaacattataagcttgcttatgaagtcaggaaagagattaatcagaaagtatattgatgaaagcagttttttcttttggtacttttgttgatttgagagtaaatttatttatatcatggtcttctaatgataagattcatttaattgaagtggttgaatttatcgctactctaaaaaaattcaaaccaagataagatgcttagatccttagatcagatgccttctttgagcgggacctgaatgcattcatccagaaattagaagtatctgtcagcgtatattttgcagacgaattatcttttacttccagtacaagtaaggttcagttgtgtctttgcagaagctggtgaacagtctgtgctttaaagggcggaagaatgaagataggttgcagatgatggtgcgtcggtatggtgttgtgctttcaattattgtaattttatacgtagtgttgtgaattgttagcatatttgtactggattggtattgtttggtagtgtaatgaaggatgatggattgtttagaagttggtggagtagcaaggcaaatataaacacacaaatgtacttgtattgccattgatgacattagtacagtttctatgaataaagaatcttcagccacaaatattgatgtggttaaaactcttggaatgcggacttctccttccttcattccttcttacatttccattttgagattgtctagcaaacaatcacctgcaggagaaagcagaagctggattcagtcacttaagttaaatataaaagggactctttcaagctttaacactttcatcactcacaggtacaaaaacttggttaaggtaagcataattttgttcataacattatgctagcgtgcttaagcataatacgtacacctttcacttaatgcaaatttatacatatgagcttaacgcaaatttgtacatatgagcaactatacgaggatggatgcagtttttttagttctttaaccacctgtcaatttaccctgtactctgaattgttaacttgatcaggaaatgttttataattttttttctggactaactattgtctgtgttctttcacattaggttcagcacaaagtaacctgcaagcttgattctcagaatcagttactcactctgtactgactgaaacggtgcatcaaatccactgaacaaaccgtgagagccaatgtcccaacctgcagctccattcacctgcagcagcatacagaagcccccctaagttcagaaatgcagttactagaaaaccacacaccccgtcaaggaggactaatttttacagccacctacgttgaggcatggctccaccgatgcaccggccggcaccgacatcggcccgcccggtggtgagtactggttactgacgaccatctccagcccatagccagaggatcctgcagaagtttgcatctgctgcaaggggctcatctggaggcaggaaggctcgacctgcgccatcggcagcgccatggccggcagagccgcagggttgcacgccgcctggctgagctgccggccgaagaggtcctcgacgatgttgaagttcaccaccgggtttgatgccgcgatcttcatggacaagaactgcaagaacagcagccacggcaagcccttcgatgaacaaacaccgagcaagaaagcagagctgcatccatggaggagggagctggagcgttggtgctcgtacctcgacttgcttctgcagggactgcacgtagttgatgatctcgtcgagcatgccggccttgccggtgaccttgttgcaaccgggcaccagctcctgcaggtacctcatcctctcgctgatcctctccctcctcacctgcaaaaaaataacagttttggccatgtcgtcgttagctctcgcctcgcaacaaagacgcgagatggaggcaggatcaatggcggtggcgtacccgttcggcgaggctgtggctgtccgtggcctgcccacggcgggctctgacgtggatgtagtcggtcttctggccggcggtcaccgtcgacgccgaggtcgccggggaatccttgggtgacgccacctccgccttcttcttggctcctggccgtgccctctccggccttcctttccccaccgccgccgccatctgatcgggatgacacggctgctgctgctgttgctgcttccctctctgcctcttgcagatgctgttgctctcaccctgacacaggtacatacacaagccagtcaaatactcggtcgggtagtagctgaactctttgcagccaatgcacaaatctctctcacctttgcgtcgtccggtctcctcttccggaagctgcctccgccgccgctgctgccgctgccgttgctggcctccggcgccagcggcggctcgccgcctaagctcccgtaacacatgcttgccaggtcctgccactcctggaggtagccgaacatggcgcggcacttgtcgtcgtcgagcatgacgtcgtcgagtagcccctggcagaggctctcgacggtgtcaaggtgacccttccggtgtcgtgaaacgtcgccgccgccgcattgcgccatattactaaccacttagcaagaagagaagacgatcaattctaggaacaaagctaagatttggttggttcttcctatcctttgatgcaaataggtagtatgtgaccctttcaaggtaagcaacaggatggtagctaatgtgtaagcttaaggggagggttcttgtgcctgaagtttgcgtgtccctttctctccctccctcttttgctcttcaggaattttttcctaatccatatatatagagtggacgataggtggatagagaggaggaacctttcattgtgtaatcgtacttttggtatgagattggatttggccctttaggtatgttcatgtgaggtagggctggataaagtagtgcgggtccctgtgtttcagctggcatatgcattggctagaacgtctcatcaattggccctcctgtaatccacaaattagcaattatgctcttgctttcatttcctctacaaaagaacatataaatgtgagaatcaatgggattgctttagttatgggcatatgaatcaacaccatatcaggcaataagatgttggctcttgaaccactccatattatttactcattatatactgcatcatccttttcaatttgcttttgaatcatagtcatagccattctcaagtatcaacttaagtgatgatcatgctccatgcacttagctaacctttttctaaaggaataacatgcacaaggttttatttgtgcatatactgaaataagaggtggcttctgaacatttgctgatgctgcaaaaggacgattggggaggtgacagctgctccattaacctgtatggacagctctatcttctctgcactgacccttgtcccaccacaccatactcgccacgtgtacatttgcattaagaaataagatgctcagattagtgataacccgttggccatattactgaacagaaccggactttgcattccagttcgttaacacgagtattccttaatgagcagtgcacgtgaacatcggcttaatttttgtccactgacaatctcctggtgattgtctggaagcatgcattgcaccccatcttggtgtctgttgtctagcacattatggaagcaggatattgaggggaactgttagtttaagtagaagagactattttcttttgaagggcaagtaatgctgctatagatcatgattagatggaattgtgcaacagttagtggttgttcaaagacaggagtggattcgaaaaaacctggagtgcttctgttcgttttgcggctaggcggttttcagtttagcattcaactatattagctccctgtctaattaatgaacgtttgtgtggatctgctgatgatcttattaagctgttcctgcagttttatgatttttttagcaaacaaatgctccaaatagtcgacgtccacttgaccattgcaactaactaaatctattatattactatcggtgtccatcatgtatgtatgtcttgcttacatagatctgcacctatatattatgagtatatagttggcatacacagttcattcggctctttaaagttaaatttatgacggtgtgattaattgaatcttgactcttgagtagcaaagctgtaaaaggtagtacaaaattcatccaaattctggggacaagcccattagggtagtttagccgtctcctttcggttgaacaactcaagctccggtttcaggttttctgctaactggatctcacatccagttgggttaggtgcaaccatagaaactttaaatccaccccaggccatgaattgggtttgaatcctgaaaaaaaggaaagtcaagttagtataaataagatcctgtttcaatacctacagttggtgatcataatacagctccagtcagcagcaagagagatgatgcatatttgtatacctgcatgcaccaatatgtgtcaccacatcaatctcattcgaggaattgaaggaaatagggatcaagaaagatcagtttgatcatcaatctcatccggggaattgaaggagatggggatttagaaagaccagtttgatcattagtaattccaatctcgatggatcagtttagcgagctagctagcgacggggaagcagaatcaggcaaaccgcccggccggcgcgcgccgacgtggccgcgacacgtgcacgaccagcgtccacacaggacgagaacttgagggtagggatggaagcggaacgacccacaaatctagtaagtgataacttatggattttcgtgtcgtggttcacttgtcgtatctaaaggtatatattaaactaatagataatccacgagtcaacgattattcataattatattcatcactaaatgagttcgtgggttgattcgtttacattcctactcgagggtcgcaacgtccatgcaagtagccacactccacaccactgccatgcacgcgcgcaataccggtggtggcctagtgctacagagcacacagcctccatatagcccatacacgcatgcactgcacgcccatcatcagttcatcacatatctcaccaagcggtgtgctgtgctagcttcgatctgtttgaccctgaatgcatgcatgcacctctcagtgtcctgatcagagagggatcgctgagttatagcgcaagggtcacggtcatggatgggagttctattgaggagagggataggctagctcctctctctcatttccatcaaattgtttgtttattttagttttgtatcgagccaaacacttatttctttgaccgtcaacttttaaaaattcattgtcgaacaacatgtaaaatatatattaaaaaaagtagttctcacaattaattaaaaaacaaatcttattatgttaaacaggataaatttctagagaagatacaaaatatttgacttaagagttaggataaaacaagaacgataagtaatatgaagctaatgcagtattcttttcttaaaaaaatacttcctccatactcgtaaaggaagtcgtttaggacagcgacacggtcttctaaacacaactttaacttcttatttctataaaaatatttattgaaaagtgatatatgtatacttttatgaaagtattttttaagacaaatctatacatataatttttacatttttaaactcaaaagcttgagagttattcatgatttatattcccaaggtttgacttaaatattttcctaaacgacttcctttattagtacggagagcgtatatgttgacagtacgttttgtgacggcaaaaaagattttaaaaaggaaaacaacagcagcaacctttttctccccacctccctgaattttttttactgataccaccgatgaaatgaaacacagcataagcgtcataaatcaattctcgaaagcacgccgatgccatagaaacgaaaaaaaaaaccgatgcaaaaatgcagtcaagtgaccgaagtcaaggctgcagagagagagagagagagagagagctaggagaggggcgcggtgtgagatcaacgcggcaaactgtgagcgactgtttgctgatcctcctccacgcagctgcgagtgcgcgcatgtacgcagatgcatggatcaagagaggaggccctagcagctagcaacagcagcagcagggtggtgggggctcgcggcttgtcttctatttgtcgatgccggcgggaggcacggcagaggggatctctgccggtgcagcccaacagggcccctgaaagccacccccagctaccaagacaccccacatgcgtgcgtgcctccgcccgcgtgatcatccagaggggctgtttggtttacagggacttattcttattctaagtccctgtcatatcgaatgtttggacactaatttagagtattaaacgtatactaattataaatattggactaattcgcgagatgaatcttttgagtctaattacgtcataattttgacagtgtgatgctacagtaaacttttgataattatggattaattaggcttagaaaattcatctcgcggattagctctcatttatgaaattagtttttttattagtctaagtttaatactctaaattagcgtccaaatatccgatgtgacatggactaaaaaattttagccccatctaaacacccctagagtctcagattagtcctcccctcccgtcccatacctagggtctgtttagggaaacttgagataactttagattctaagaagcaactgtttggtagctagtttctaataatctggaaaagctctaaaacccagcttctccagcttctggctttttagttcatttttcagaatctgtaactgcagattctcggaagctgtgaactgtttggggcagctttaagcagcttttgggaaaaattgcagctagaacgagctcccccaacagagccctagccatagccatggcccgtagcttagcaacgtactactcccccgtcacaattatagaacattattgtttttaaagaaaatcaaacttggtaatttttttactactaattacactaacaatatctacgataagtattatataagcatgctatattactagatttgcacgttaaaatattttatgtgatgttaattttatggtggttgataatatatacaatatgaaataaattagtagtcaaattaagtactccatccatctataaaagttacacatattacttttgataccaaaaccaataagaaattaaatcatcttggatgttacaagatcaaggagtgaatgcaagcatgcaaccaatgagtatttagatgattccttgggttctaataaaacatttaatttatcttttcatttaattcttgagtacataaagactataaataggaacaacttatttggaaaaacttaaatgtgaaataggtgtaacttttatggagggagggagtatatctttagaaactctgtagaaaaaaattgcaaatcttataatttgaggcagagggtgtactagctagctcgatccattatccatttatgtgtggcattcgcttctcctggacaggtgtggtgcggctgattttacacatggatggacgatgcgtgtatggtccgggcttaattagcatgtatacatgcatagcgagcgagcaggttaatggaatgcgtcaaagtggtccgcgcacatgcagtaaaccaagggtattgtctatggttaattaagctgctgcctacgcatcttgacaaacttggggggtgcatgcatgctgcatgcggtccagaattcgtggatattcaggctatgctatccgtgtacgtatgtatgtaggcggatatatagtaatcaaaatatctactccctccgtttcacaatataagtattctattattttccacattcatattgatgttaatgaatctagacatatatatctatttagattcgttaaaattaatataaatatgagaaatgttagaatgacttacattgtgaaacggataaagtatattacaggtccaagctagacattaagtggatgattcatccacttaatgtttaatgtttaactccctcttgctcccatatgggacgactgatggatatgcagccttgagttctatctattttatagctagttttcacttcaaaattgttcaccgataagtagagagttcataaaaccgacgaaaagtcggtgtccatgattaactgatactagttgtattaacaattgagtgtaccggtgcactgatacctccgttcttaaacaatactcacttcgtctctaaatatttgacgctattgacctttttaaatatatttgaccgttcgtcttatttaaaaacttttgtgaatattattcaataactttagtagcagtagtaaatttaacaatgaatcaaatgatagaaaaaagaattaataattacttgaattttttgaataagatgaacggtcaaacatgtttaaaaaagtcaacagcgtcaaatatttagagacggatggagtactagagtactactaccatctaggtatctaagtctgtgtttagatccatgggtaaaaagttttggcgtgtcacatcggatatacggacacacatttgaagtattaaacatagactaataataaaacaaattatagaattcgcctgtaaaccgcgagacgaatttattaagcctaattaatccataattagcaaatgtttactatagcaccacattatcaaatcatggagcaattagactcaaaacattcgtctcgtaatttacaaacaatctgtgtaattagttatttattcgtttatatttaatactccatgcatgtatccaaacagatatgacacggtgaaaaattttgccagtggatttaaacagggcctaaacagaacagagggagttgcgcgctatatggtgtccccatttaaatgcatttcactccggcttggtccgttctagattttttttatttttaagaaaaaatgataatcctccattctattttaagtgcaaccatgagtttctgagtctaactttgatcatccgtcttatttaaatatttttataattagtatttttattgttataagatgataaaatatgaatagtattttatgtatgatttatgtttttaaacttttttaaaaaaatttaaataagatgaacggttaaaattggacacgaaaaaatatagctgtatttatttaaaatgggacggagagagtagagtacaatttaaaggaacacgggagaacaaactggagactccaccatcctctgtttgttgcatctgtgtcaccaactcttgttaagctatcagtctaccactccaaagtaaccaaagatgtggcattcccatcaaggatccagcctatatatcctttccccagaccttgattgaggtagaccggattactgcacagctgattactcgtcagattttcatcatcgatccactgtttaatgatgcatctcaccttacgtgcataattacgggcactcaaacttttgttttgatgcagactcaacctgccagcaaatcgacttcgagctttgacacattactttcatccgaatcggatgtggcatacaattagtggcaataagtcaggagactgaccgccattggtatatctcagtggagtttttacactcactaaaaagctaattaaaccgacgtgggcacattaaaaccgcatgctctacagattgtgcgcttacgatccggaattgaccttgcaactgatattgtattgtggagagttggattgcatccaatggataggccatatggctttcaagcaccataaaacagctcaagtcatttttcttctcctgttgatcaaagggtggatctaggtgggcggctgcctgggcttcatgctctcgagctattgaggcaaagcgacatcctctaatggaaaaacgccgagaatttgctcagtttctggtagaccaacaactttttctgtttaggctcatcaggcctcgtaaaatttatggctccaccacccactgctgttgattgacaaccttaaaaaaatttgagtcatgtaaaaaaaaaacttcaggaaagaactgttgttgattgatactaatttttaagaatatgcacaggagctggatgccccaaaaaagaaactagattagtacacatcccaccaaaattctttatatttagagatgggagagtaagaatttgatattgatgcatgtttgaaatttctcacaagagctatggtgaaggttgggaatcttgccaggagcaatcatatgggtccatcagcatggtcttcatcaagtttgttggcttccaaaactagggcccgggaatgataggtccctgtgaagggtagcgatctgctatcctttcgggtggttctctttcccctttcttctgtctgatgcatctttggtctctccacagctgtctggataagggcaaggtacaatgtcacggctgtgggaacaggaattccagctctcctgaggctcttctatttgcaacatgccaactgagtctcctttgtgttaggacttaggattctaagatcactaggtaccgatttagagattttgctacctcataggattaaaagtatggttgaccttatagggaagaaacggagagagagagggatggagaagtccatagcctcactcttggagcttgacgtggccatggcaatggtgtggagtcggcggcgtcagtgaggatgacgacaacggtagtgagctatcccctcacttcagcgcgcttcccggatcggagggattagggttttgtggggagtccgaatgcacggcgaacattcgttcgcgtgcccgacgactccccctttttattattgcgctacgtgagaggggcccacggccatagatcggccggcgcgcgttagggtggactggggaatcggtctcccgattcctgcggagatcacaactaataatttgaatttgacttgaaggatatttgaaggaaaaacataggatttcaaatcatactaaaaaattatatagacttccatagaaatcaattcaattctagaagtatataaatagcctcccacatttcaaagaaggcatgaaatgttttatacggtattttgccgatagaatatagaattcatgtgttccaaacaggccttgagaaaatttacattttcaagggtttaatagctcacctaaaatagtctttatgggccatttgaacgtggtggttttaataacagggaattgttgagtgatttattatggcaagtgtttgtttcatattgtaaatttttaatgtgtgtattgttttattcaattattgctgttcaaatgcctgctctcaccgtctgcttgttggtttatcaaccataaccaaagtttgatatttaatacttaattatgatttgattttgggtttttctttaatcatcgtagttcatttttcttctacggcctgtcagccatatcttaagttctcaaccgattagagtaggaaataattgtaaccgtagtaacagcgtggaacattataatactcctgatgataaattcgatcctcctgaattctcagcctcctgagtcctgatcatcggttcggtcctctgctcctcgtattctactgaaagtacatactgttagcagtacaagctgccaaggtagccattaatgttttgaaaatctgatcctacggtccctccagtatagccgtcttttcaaaaacccgcccagtacccgacagatctttccatgaagaagagaaaactccaaaagaattagaggtggacactagtaccagtatccctatccactgccatgaatacatctacagggtaactaaccgtccacggaggctgcagatagtagcactacaccaacaaaagtcattttcaacggcgtatatagtgttgtgtacaggcgtaccgccaccaccgccacgtctccaccgaaacatctcttccgccgcgatatgctacgaaatcacacggtgtcggcgcgcgcccactacagaaacgataaatctgacgagaaaaatccttgggccgcgacgcgagccctcaaaacccgtggcgtttcaccccccgcccgcgcccgcggtcgccatcacggcgcaacaacatgtcgatcgatctccaccaccaccattggtagcgcgcgtacgtccgctacgccgcgcgaaagccaaagcgtgtgttgctagcttagctagctgcaggatcatgcactcgccagcgacagcacgcttctcctgatcggtggcggtgcactgaacttgggcacagagagagagagagagagaggcggccgggggctccacgcgatatggcaccactagagaggtcccccgggggaaaaggaggcggcggcgcgcggtggcagcagcgcagcgaccgaccgacccatatcgtgcaatttttctcgctctccatcagggctagtacagtactccctcagtcaaaaaaaaaaaaaaagacaaacttggttttcgtgcccaactattaaccgtccgtcttatttgaaaaaattatgaaaaaaaataaaaagacaagtcatacataaaatattaatcatgctttatcatctaacaacaataaaaatacaaattataaaaaaatttatataagatggacaatcaaagttgacatggaaagtcagagtttgtctttttttcagacggagggaggactactaactataggctgcagtgactcttattctgcgctccagctatcaaggagcgagcagatcaattgcggaatcgtatcctgtggcctcctggcaggcagatcagggaaaggcacacgagtatagtagtacagggcaaaagcgaaacctgcagcggttttgacgaacaaactgcaggagctcaaagccgtccctggtaatactagtgtagtgggagtggtgtaaactcggagcagtggctaacttggctaatccaaagcatcgatgcagccaggcatgctggattttttatgatttggtcctttaaaaaaacttatttcataaatagatccctgaaaaaacttatcctgaaaatggtcctttatgagcatcagtatcgctggcgccgtcgttcaacaggagggcgccagcctctttgccaccgtcctcctgccaccgtggtgggttggcactgaggtggtagggggagcacgccaatgtggctggcaccctcctcctgatttttttatttttgatattttttcacacttaggagcacacaagaccaaccatagaaaagttaaactcaaatgtatgaaatatgtgacttgtaaaatttttcaaactctatcgaaaagcttctcgcctcgaaaacacaatcctgcaagtggaatttagatattataatttcgccggactcagcaaagccggggagaatcggatgtaactttttctgtaaatgtctgtggatatattatttgcctgattctgagtccacatgagaaagttacgcctgttttaaaaaatgacacccaaatgtaacaaataaaatacagaccataactttttttaatgatgtaaaagatgtaaaaaaaaggctaaaagtgttcgaaatctaatatgtttttttattataggaaaaaccaaaataacgaagagcaggaagagcatgcgcgccggggggggggggtcggtatagctttgaaacaagtcacatatttcatgcatttgagtttaatttttctacggttggttcttgtgtgctactaagtgtggaaaaaaataataagagtaaagtccttcaccggtccctaaacttgtaccgttgtatcatcccggtccctaaactcataaatcgaccattcaggtcctcaaacttgttcaactatgtcatcccggtccctaaacttacagatgactcgtttaggttctccaacttgttcagttgtgtcaccccagtccctaaacaggacggtctaaaaactttatatcaaaaaataattcataactttttcatgtgaactctaatgaagataaactttatatcaaaattgtagccctcgacgtgacctacaactttgtagttgaaaagtttttgaattaaaactgtttagggtcccaaaatattgttgcatgtttataattttgaaattttaattttaaaattacattttgggacaaaaaatgacttaaaataaaataaaaaatcaactacaaagatgtagatcgcgtcgatggctacaaatttgatataaagtttgtcttcattagagttcacgtgaaaaaaatatgaattatttttaaatataaagtctttagaccgtcctatttgacccagatgatactcaaatcaaagtttagggaccggggtgacacaactgaacaagttggagtacctaaacgagtgatctgcaagtatagggaccgggataacacagtagaacaagtttgaggacctgaacggtcgatttgcgaatttaaggacagggatgacacagcggtacaagtttagagactggtgatggactttacttaaataataataactagcatggcggcccacgcagattacacggctaacatcattatattttctctcatataatagcatatatgttttctcattgtattattcaaatatattaaaatgacaacataattttaaattttgcaataactttacaaaactactaatgtgtaatattcatattgtattttatatatgtgttagttattaattatttttaatatcaaattttagttatttataaattatatatattcctatctggactctagactcgtcttttaatatttctttttttaattctgaattttctgtaaattgtatttctatatagactctatgctcttcttccaatattatttatttttatttctgaatttttattatttctaattgtatttctatgtgtactctaaacttatctttcaatattctttaatttttaatttcgaatttcagttacttctaaattgtattcctatattgactttaaactcttcttcccatgtttttcttaattttgaattttagttatttataaattgtatttttatacggactctaaactctacttttaattttattttgtttattccaaattttagttagttttaaattcatatatggactctatactctacttctaatattgcttattttttaattccgaatttcttttttttcttaattatatttctatatgtactctatactctacttctaatattccttatttttaattccgaatttctattatttcgtaattgtatttctatatgaaatctatactccacttctaatattccttatttttaattctaaatttctattatttcctaattgtatttctatatggactctatactctacttctaatatttcttattttttattccaaaattctattatttcctacttgcatttctatatggaatctatactctacttctaatattccttatttttaattccgaatttcagttatttcctaattatatttctatatggactatatactctacttctaatattccttatttttaattccgaatttcagttatttcctaattgtatttatacatgtactgtagtctcctcttctaatattccttattttttaattccgaatttaagctatttctaaattgtatttctatatggactctgctttttctttttctccgattaatgtgagaatttataggccatgagagcaaacgtggaggcttctttttcgaatttcagttatttcttaattatatttctatatggactatatactctacttctaatattccttatttttaattccgaattttaattatttcctaattgtatttatatatggactgtagtctcctcttctaatattccttattttttaattccgaatttcaactatttctaaattgtatttctatatggactctagtatcctattctaatatttctttttttttaatttcgaatttaagctatttctaaattgtatttctatatggactctgctttttctttttctccgattaatgtgagaatttctaggccatgagagcgaacgtggagactcctttttctatttctttaataataataataataataataataataataataataataataataataataataataataaagaaggatgcacatctctctcctctacactagagagaaaaaatgccgggttggcgccgccctcctgccacctcagcgccaacccaccacggtggcaggaggacgacgccagagaggctggcgccctctcgttgggcgacgtcgccagtggctctagcgtccaaaaaatactatttttgagataagttttttcagaagtatatttataaaataagttttttaaaaggactaaattgtgaaaaatccaggccagccatgtgtgatagtgcgagcgagagcacactgatcaaaccaaacaacacgtcaacaccttaatctgccaaatccgtgtgcggtgcaaattgcgcatgcaattgcaagtgtaattactactgcaaatacgacggatctgcccgttttgcgcatgcgctctgacagttgacagtgcaggggaatgggcaccggcggtcaagctggcggcataggcgagtgacacggatctcatcgtgttcatggcgctggtggatgctgcgttgatgcctttgcacccagaggaagaaaacgaagacatgcccgggtcaccgtgcgctgcacctgggcttgggcaattgggcaaagcattgcatatttgcatgcaagggaagaagaggacacaatcaacgttcgccagattggacaggattgtacattgtagtagcggcagtgtagcccccatgtggccataactggaatgggcgtcaggaaggttcaagtgtgtctgcgacttttattgcccccacttgcttctcgtccattgttggtgcaaatgagcactcaggagcagatcttgtggcaccaactgaaaattcagaaccaccacgaaatgaaattcaaaactaccaaagattttcatgtcatccgatggatataatctgcacataaaactcaatatggtattagagtagagacgatgttgttctattcttaattgttcttttttatttgaaccatactgcttatggaattcaatagcgcacgtgacaagatttcagaatgagaatgtgcttgcgtgcctgaacctgattcaggagaattcggaaagggatggactgatggtgcagccaaggttccactcatccggtgaacgtacgattgaactgacggcccggcggcctcgagtcagtgagctacacctgtgctgggttagctgagccatcatcatgatgagtgaagctgacataactatggtttttgttagcgatagtgggatgacaaaaggaacaagggaacaaatgtgcagtcttccaagcgattgctcgagacagattcagagaatctgtgcactcaacgattgatctggaatgcaaaagagactggcatgatcgcgtcttgcattgtggtgatggtagacatcttcagaggggtacagaacagctccagctgaccaggagaactttgcattgtttttgaaacgaaccacaccaaacaggagtacaagattacaactctataaggtaacaatcagtaaaaaggaaaaagcacaccaccacaaaactgacgactcccaaacattagcttgaggaaagaactaataccgagtcgaccgccactatacattgtcggtcgcaacagctcaggcatacgcacactgcccaacctcaactccaagctattggccaccaacgaactcacagacgtctctacacaaagaggttgacgagggggagggcaagagagaagaaggatccactcgtccctcccgcaaccccggtggcaacatccaagaggaccgctgaaggtcagacaaaatggagctgagaagagacagaaacatgacctcctagacgatgcctctagggatatcacaacgctagaagcaccgccgccacccatccaacggattggacctagttttcacccgaagcatcctcctgggagagaaagagggtaggcttcatgacaatggccccaagagggaaagcgatacccaaaggcgcctagctagcctttcacccacagcctcccctccctccctaacaccgcaacccacccccccccccccaaaagaaaaaaaaaccaaacagcttacgctagcatgtgaactctaccgcaccggcacccttccgccaaccagccttcaccctcctaagggcatcaaaggggcctctcactcctaccttagaatttgcattgtggtcatatttttttttagtgtagctgttgataacgggaattatcataaattagcattgaagtcatgttaccttccctcttcaggaacctatggtgtgatattagcatctaagtagtagatgccacatggattttttttattaggtgaagaggagagaaaaagaagagagaagattgccatttgttggtcaccggacgatcatatagacatttatcgaaataaatctagattactataaaagagtgttgttgtatgggttgtttgtatatccttgatataacatggaaaaagattatatttagataaccgtcatttacaggattaatatgaaagggaggctcaccttcttcttcctcggtgcccctacttctctccataagctccataaggatccttctcttcctcaacgccccctatttcttttcctctccttcttcctcctcccctctctccgtaaggatccaacgggataggagccggcaccaccttgaatcatcctggcgctagccatggatgagaaattttataatttgataaagaaaaagggtgtaagttcccaaagagatgattaataagcctcaagttaccacactaatccaatgtccagtcgaaattaccattcaagttggaaagttagatctaaataataatccggtcctatttgactttggccgaattagctgatacctctgccagtgtataccagctataaaagggggaaaaaaggaaaggtaacagccaacaaagggatggatcaccagttctgctttcttcagaacttcagataagataaacaaaaccttgttttcaggctttccagctgtcaatggaacagcactacagcagagtacaaaaatacaaaaactatatctagcctactttttacacgcagcaagatgcaaaacaactgcaatctgcaagatgcatcacaatagtttatcaaactctactggaatacatgaggatgaaaaagatcatctcatcaagcatttcctttggacaatacagcctctaccaccctatacaaaagaactgttagtgttataaaatatacaaggactactagatcgatctttaccagttttcagaatagcgtaagtgaccggggctttgagaaaatgttcaactttctttggaaaaaacgagatgactttggtattggctgcttgtgaattgaactgtcaggaggaccctccactacatctgtgacaaccacttcttgtgaacatgagttgttcaactggtcggttcgcctcagatccctgagaagatgaagtagcttcattgaacaaccttttgcttcatcaattccatttactgacaagtccacaagggcagggattacaccttccttcattacaagtaaacaatcctcagaactatgggaacatactgctaaaaggataaccactgcatgctctcgttctttagggcttccagtgtccagatattctgcaacggaaccaaggcatcgatcagtttttgtaataagcactgtggcttcttccacatcacacaggttccgcaaaatctccaagcaacactcagcaaaggttccttcagaaagaatgggtgacaatcttgagacaattcccagtgaaattaggtatggttttacatccgaatcagatgaaagattgcagacaatcttcaggcaaagcttgagaccctcggcatcttcagactccaataaaggagtgataatagaggccatcaaatgggattgtcgacaactcaggtgttgaaccagctcgtgaagtgtcagcaaagcttcggtttttaactcagaatcaataaaggatgcaaatagacggaatgcttcttcattcatgtgtagaatattagtcctgtacgtcaaagaaatatgttgttaaaaaaccttcattctgattgtgagctatgagagcaaatgatcttcaatataaaactgatgaaaggaacacatttgtcagaggaaatgtggttacctgctattggaaagaaaaacacgaaagaactgaaatccaactttctgagcttgcatactgtagcttccatcttcattcattaagaaatcaaagaatgcctctacaaatccattggaaaccatagcacatgaagcctcattttcctcattgagaatgatcttcaaatcaccaatggacctgtcttggagttccaatgggagcttcgacagctcgtaaaagaaccttaggaacttgtcctggttgaagttgcgaaaagacaaacactcttgatagtccgcactccaagagaactgagaaaaactatctttcggttcctccatgtcccgcacatgatatgaatctgacatataactggcctcagataatgcaacagatgaagtgctatggtcaatcacaaaatccctgacttttccagcaattagaggtactgaaacattgtgcagacttgacatggagtaaccatgcaattgctccggcaagtaactgtatgcatttttggatggagggagaatatctgagattatgaaaccatgctctttgcaccaattgaaaatgaggtccctcatgcaagtatttggaatcatcgcgaaattttctagctttatatgtgtcctgggacaggtatcatatccctccctaaaccatctctcaatattttctctttcataagtctgcccagatgttattatgacaggatcacgcattaactttgttgatattgggcaacagaactctgcaggtggtgtggctgctcctgacatactagtctgatcctcattcctctggatgtctgtgggtgtgtaccactttccaggagtgctggtatcactaacaaaacttgagcttggagtcgaagactggctttcagattgcatgttttcattccgctcaccagtttctggtttgatgttttttccatactttttaacaaggtatagaaggaacttaagaactccctcctttttgggatcagtaccgctaatcttgtcaagcagtttcttgatagcccttcgttcaattagcatagatttaggagatgtcaggtttaagtttgaagctgcctgcaggaatgtctcaagttcaagttcttcagtcacatcagattgccgaagcatctctaaaatggttttgccagcctcttcttctgtgggatcaataacaaattttatgtccccaagatcatcatggacgtcaacaatctgtgagaaaaagtaacttcataaacaatcaagcaaatgagaagtagttgcaagaaagatatcatagcaatacacagaattccatgataaaagtgatatatcctctaactgcaagttataagaagcatgttttgatcaatttgctgcttattgcaggtgcttctataaattactagtatttcaagttaaatcatattactttacagaagtaggtctggagacctttgaaaactcagttgtttggagaagacaaaatcaaattccaagaatacaagatatctttcagtattgcttttatttactggccaaaagaaaagctatatagcaattcatgcacatgagggaagcaaaaaaaaattgttatttaacttataaacagtataatgactttgagtttgtgaggctgacatgatagagtaaaacaacaaagatcacaaaatgaactaacctgattagctagtgctggtgggaccatgttctcaatcaggaacaagctccgcctaagtgagtctctgatcctttcacaccgagatacaatcgcctctccagtaatagcctgaacacaaatacatacacacaatcatcaaatggtaaaataataataattagcaaatcagtaataaatgaaggatatcatattcttagtttccaataaacacaagaattaacttaccaagtagagcttgctacattcaacgcagtgctgaattatgagtttccctttctcaactatattgtataggttgcataattcctgtatacctgctttacatcctggtcgagctgcctcaattaatggaagaatagaggagactttatctaacatcattgtcagctcactgcacattgagctgtgaacctaacagagcaaaacaatcgaataagaaacatacaaataatggggaatatgaaatggataggacgaatacataatttttttacaatgacacactagataatgagaataaactctattattcagtctagatatccattcccagaaaatcgagttgtctcttgagagtcaggtttgaaagcttgcaatatgaggattcattcttctccttttacatgatgatatttatattaatgttacaacttcaacggtcactagcatttagcttcacatgacaccatcaccatgccacaaagggccaaaaaattgggatcacgggaacgagcgttactgccccaccatttgcaagagtgctttcgcttgcatgaaagtggcaaatagccacagaatttatgcttgaacgatagttaaaatattagtaaaaaggagggagtaattcagcattctaccttagggcaagaattacgctgggatggacccatatcttctttgttcctattctccatccacgatgaatgactgccaatctttaatccaagaaccttgaactgtttcagcacagaaggtaataaccggatcaaattaaagtgcatcttaccaaagtaggaaggacatgcataattattttttctcgatttaggataggataattcaatcaaacaaatgttgattctcaaagtttttagtggtcatgaatcaagggaaaatcaattgtgttttctttgatgagaactatcaattgttgtaaaaaggtttgttctagtagatactattcactttaaacaagctaaactaaagagaagataacatttggacatttaataaattgtttatcttagtaaagtctctagcaactaccccatgctgtatcatcacccatcttatcatggggcgtggttgttgctgtagctaatgtttttcatcttttataaataaaaaatggcatgcgagccttttgcgtgctattgaaaaaagtgtttgctaatataaatttgcagataaattgtacaacgtataaaaaatggctgattccaaataggtcaggatacatcctttgcacacacagaagttctagctagatacacacccaagcctgactcccagtctcccagtgttgccaaaaatcgactaattaggtcaacatactgctatattgttgatcaattaacagaatttacacctttcagttgaattcctaccgtaggttgaagccaactaattggtcaaaaccattgtattcaattctttaagcacccactggataggtgtaaaagtggtgttatgatgttatcagtttattagtatagctcgcaatattatttcatcttcctgagcaaatgcatatgtggtcagttgtacgttttagattcttgtcaactttcttgtattgtcacaggaagagcattaagaacttgacaaacaaaattgtttcaaaactatagtgctttttcaaggctacgggccaatttcatatatccatgtagattggtacagaagtgaatcgcctgataagacaaagggcacactaatactaaattagtactacctccgtcccaaaatgtagctatttctagcacagtactttgtgccaaaatgaagctatttttacctaccttctcctctcaaccaatcacaaccattctttttcacctactttctcttttcaactaatcacacaccttcttcaatcattctcacctactttcttaatacccgtgccaacctcaaaaatgcttacattttgggacggagaaagtagtatattctaaggttgtcacttcacattgccaactgtaccaaggcagcatacctgaatcttgcaagagattttctggaaggagcctaacacaagcactgaagcacaagaaccattcaattctacagaattctctgatcatgaggcttaaaccccaaccagatcgactaccatacaaggagaatgaagaaggagcagagaagaatgcaaaattaacccctttttgtattaaggaatggacctaaaacgtgcaaactgaaacaatacaaagaaacaaaggtaaggttttggtctccagggaacgaacaggacgggagaaggcagacagctaaactacccaatactaaagtaccaaatcacaagtcacacccgaggaagatgaggttcactgttcatcgaaaccatcaaaaaaacctcactttgttaacaaaaggatcctaatagctcagattattaatacgagataaacaacaatcaagcaacaatacagtacacgttaacagcataaaccaagaagagaaaaaacacttcggaaatgaacgaacctcctcgtcgagagtcaagaccttcctgattgaagaactccccctgaactcagtcggaggaatcaaccggagagtcggaacaggagacaaagcaaaacccctctcctcctcccgccgcccaagcccgcgagatgaaccaaccccaaacctctcccacgcccctgaagcagcccaagaaggcaagaaccgatctttccagaatattaaggcggtcagaagggagcgatcggtcaaggaggaaggcagagagagcggcgttcgtcgccccccggccacacccttgagcccggatagagatggcgcggccgcagagagagagagagggtggaatcgcggaaatgatgaatacagatgggtacaccacccgggcgctcgctaattattcttttcctgctcgtgcctaatcttcctcttcttcttcttctcctccccggtcgtcgtctacgcctcccgtagcggctcccgggtcccaccgccgatggcgccaccacccgagactcctcttcctctctctctccttcctatctcaatcgcgttggtagatagagagcgagaaagacagcgggattgtttgtggggagggggggacccgcgcccgagacgagactggcagtggcaggcggcaccagcagcagcgacgattttggtggctgcgcgcgcgcgcccaccaccagtccaccaccttccgcgatgatgtgatcgccgggaaaagcacggacgcgctctacgcgggctctcgctcgtctcggatacacgcgccggttggccacccaccccctccgcggcgcgggcgtgcgggcgtgcgttgcatgcgacgagcacacctgatctcaggcgcattacgtgctcggtgctcgacaggtcaaccaacacagtattaaatatagaaaaaaaaataattatacagattgagtgtaaattgcgagacaaatcttttaaatttaattgtggcgtaattttataatgtgatttaaatatatgttcgtatatttgatgtgacccgttaaaactttacacccctaaatacagccaaaatcggtgagtagcaccagtaggcagccgcacgcaccgcgcgcacataaaaatagaggagaaaaagaaaaagagacggtagtgttggtttttttccagaagcctgtgtgtggctcgctagacggcgggccaggaatctcctggcacgattgaacgtccccatggcgataacgaaatcaaggattccacgagacgataagatcgagcgcacaagtcagcagcagagagagggtcagggcctggcgtcctgatgaagcatccgtcaccattcgtgcgttcctgcgagcgaacgacacgacacgacacacactacacaaaaccacgaccgcggataattcgagaggtgtgaatcaacaggtcgacacgcgcgcagcacgccttttcttttgatcgagctggtgggcgcaggttgctctcgcgaacagagggaccgatcattcgatcatcctctccttctcgctcattttttcccttcacggagaagacgacgccccagaaacgatcgatcggtggcaccgtgacaacgagccgctttatgcgagggcgagtgatgagcgcgctgtgcctcggcgcgcgccgagggcgatcgattgacagttgacacgccaccccggcgcgggcgaacgagaggccacgggcgagccgtagcgtctcggccgattggctcgggccaaccaaaaccaaccacccaacggcaacgggtgccgtctcggcgttggccggcaggaaaggcccaccctcgcaggcaatgtcgggtgttggtgtaggtcgcgtctcggtgccaataaaacctcacgtcgtccattgctcccctgctgctgcagctaccgcgcctaccgtcgtctcagcgacattctgatcgtgttgtgcgttacacgatttgggaggttttgggctctactcctactacatgtggccgagcgactggctaggtgataaaggtgatccctttttgcgagtgtgtgtgactgatgagtggtgagtgatcgtgtgtcggtgcagcgcatcgggctcatcgatcttgttgcggttcataattcagtgcaaaaacggcgacgtgtggtgatggagcgtctctcttttcctgattgctccgagtcgggcaccggatgacgaacacgtaggagggctgactttcctatgaatcatttgtaggagtactcactcacaacctccgatctgaaaggaggaggaagggaaaaaaaaaaaaaagagaagggcatcacttgtgccgttgtgcgtgaacaatgtgcagcccactgagcagccccagtgctccgggaaggaagacgacacttgccggcttgccgctgccgccacgcggccacgcgcgccaccgcgtgtggcgacggcttttagctagtgctcgcgcgagccgccggacggcgatcgcggccacggctccaacgatgcccttttgctgcgatgcgatgcgatccgatcaaagcgtgcgtctgagtgtaagtcgctgtccgtatgcgtgtgagcgagcgatcggcccagctacgtgctacgtgtcctttccggtcagatttttatttaacagtagaggatttcccgattccatagtccataatgacgggactgtacgtacaaaagctggtctcgtcttggattctacgtacgcaacactacggcgtgttcattttgatgccatttttaactttatcaaattttggtaaagttaccaaaaaaaaatagctacatttagtttgctgccaaatttttgtaactatataagaaatcctgccaaaattttggcaactatgtcaaaattttagggcctgttcactttgatgctatttttaaccttaccaaattttgttaaagttgctaaaaagtggctatatttattttgctatcaaattttgataagttactaaaattttaacaactatactaaaattttgtaacaaattttggtaaggttttttttcattcaagtgaacaggccctacgtcttcagtcgtacacgatcgcggattcgggcaccacagtgtcagtacaataaattccatgaaagggtcacctttgtacgtatccagaacttaagctgatcgccccggttagtcgttctcatcggctcattaaacgcaggtgtatacgtgtacgcccggggccatgcctgcattatatatgcagccgtctagccgctgcccatctcttggcacgtgaacgcgcgcggccgtgcacgggacaccatcacaccacgcctctcccctgcgtgcctgtccccgcgcgcgcgacaccgtgcccgtgtggccgtgtcaatccgcggggtgcggctgcagaagcagacgccgcgatcgcaacccctctcggcgtttagttctagtccggcagcggcaaggtttgatccgatcaaatctccaaagtccagataacttctttcgcttgcaggcgtgttcagccgcgggcgcgggcggtgcacgactccacgcgtcgctgtcgtgcgggttttgtggcacagcggcgatcggtgtcacgcgagaaacgtcagccagaaaaggggcgttctgcgtagcagccgtgtttaaacttcaaaccggtgaccccccatcacctcatcaccaatctcgtcgttgcgttgccgcggctaactcggccattgacccgcaacaatgaatgtttcctcgttcgatcttccgggtcagatcatcatcggagagtcagagaagaatacaacattgggtgtgttgagataaaaaaaaatttagctaaaaatattacatcaaatgtttaaacacatgcatgaaggccgtgtttaatttactccttattcccaacttcccatcacatcatatcacatcaaaaactttcctatacacataaacttccaacttttttttcaaactcccaactttcttcaaacttttaactttttcaggaactaaacacacccgaagcattacaagtagacgaataagcgaaagggtatgtaacttagtggttacaagagcctcagtaacacctaagctcctgggtttgactccccatgggagtgatttttccagaatttaacggcgttatgcttaatttttcaggatttaacggcttacatgtaaattgggaaacgacgactcccatgggagcgaatttttcagtattaaacggcttacatgtaaattgcgaaacgaatcttgcgtagtacagtgtaattctaaaaagagtagacgaataaaaacctttgcatgtaaattgcgaaacaaatcttttgagcctaattgcgccatgatttgacaatgtttagaaagtagacgaataaaaactaattgcacagttttcatgacaatatttagaaagtagacgaataaaaaccaattgtacagtttgcatgacaatgtttataaagtagacgaataaaaaccaattacacagtttgcatgtaaattgcgaaacaaattttttgagcctaattgcgccatgatttgataatgtgatactacagtaaatatttgctaataacggattaattaagcttaataaattcgtctcgcgatttacaggcggaatctgtaatttgttttgttattagtctacgtttaatacttcaaatttggccaaagaactaaacacgaccattatagcactgtcagggaaaaaaattctttgtggggattaattaagcttaataaattcgtctcgcggtttacagacgaaatctgtaatttgttttgttattagtctacgtttatgttgatagaaaacacgaggcctgggagatctgcttaactccagtgcaggtccaaagctcgccttcgaatgtatgaacgtgccagttgatttgatcctataatcaacaagaaatagagacaaagaattcgtggttaaatctataaatgatagccgatcggctaggtgccgatgacatatcatttatctttgagccgatgtcctatatgaatcgatcggcggttataaatagatagtaagaaactaaatctattcgatcggctgtagatactaacgatatatatttctgatattaatatatacttaaatcaagtgattgggatagatcggtcaccatgtcgagacagtataaatcacttagatcgaaatatatattaataacaggattatatatgtttatagcatagccgatcatatagatctagcgtgtatcggctaatactccgatactactctatatcaagatattaaaacatgtatgatgtattaaacagaagcttaatatatttagattgcaacgatatcttgacacaaagggcggatttaacatgtcattgaagcatatagatcaaatatggttaaatcagataagatcggctgaaactccgatactaccctaatcggcagccagaatacaggctagagattgatattctaagcacgacttaatagatcaaactcaactgatgtagcattaagtatgaaaagaagaacaatatctagacaatcaagccgctggatgtttcttaaagtggtagatgtcgacgtttgatgtcgtcattctggtatttgcatagtatggggatcgtcggtgctagaatatatgcgagactgaggtaaaagaggtggagacagggatttttatacaggttcgggcccctgagttgtcaggtaataaccctacatcctgttggccggagccggagttgcttttattcaccataatcacaccagtacaatatgtgggtagcctatctaactgttgtcgacatgtcggtctgaaggtctgactcgtagtcgacaacagggtagccttcctcctcgaatccgtgcccggcgagatcagagatagcgctttcgtatcttctaacggtatccggagacaccgtaggggaatagctatgcctatccccgaagtcgatatccgacagcgtgtcttggcttacgtaggcttgtatgttgtggcttctggtgggcgtgtgttgatagttgtcacaccccgaagttctcctcccaagcctaaaatttaatttttaaaacgaccccaagaaaatgcaggtgaaatcaagagaaaaccctaagaaagtaatgcaaataataatcggatttgacatgtggaatttttcttgagttctacatgtcgaaattcattaacaggatttttagtggaattttccgagctctagaaataattttaaccaattaaaattgagcaagcaatattttaattccagggaaaatcctttttcctttttctttttctttttcctctcttttcctctttttccgaatgggccgccggcccattctctcctttctccccccctccctgctgggccggccgcaggccgaggcccagccaggccgcccgccgccctcctctctcggggtcgccgacaggtggggcccacctgtcgggtccttcccccacctcccgccgctcccggcgcgccgccgcgcccacaaccgccgccgcgcccacgtctccgcctccttcgggccacgtcgaccatgtctgcgcgtgcgccgcgtctcccgcgcccactcccctctctctcccgcccgcgcccgcgtccgagatggccgggattcgattttcgaatcccgcctctctctcctcccccactccccacgtcggccggcgattcccgcctctcccggccacgtccggttctctctctccctatttaatcttctccgtcgccccctctcgctttttccccatttcgccgacctctcccgagcctcccatcgctcccgcgccgtgcaacctcttgccgccgccgtttccgctactccggccgtcgttagccgccgctagggtcgccgccgcaccacgccgtcttcgccgtcgggttcgcaaggctaagctccaccccggccgccccttccccgtcgagtttcgtcgccgaaattcgcctcccctcgcgctccggtgagttcaaccgctaccgccgctttcggccgtgaataccggtcgccgtggttcatctccctctctctaatccttctcttctccttccttagggcaccccgaagctcgtccgccggttgccgttatcctcccgtggcttgccgttgccgttcgccatcgtcttcctccgcgccggccaccctcggtgaggcatccttcccctcttttccccttcctctcctcctagtgccgcgccgccgcttcaagttgcgcgccgtcgccttcggccgccgccgccgcctcccgtgccgccggtcgccgccgtcgtcggccgcatgccgtcgccgctagacctggccggcaggtcggctttgatgccgagccgagccggcggtgtagacccccgattttggaaatcggaaatcttctgtatttatccgtaccattccctggatcagtagttggtacacacatacatagttggatcacaacatatcacgaatgaatttaggctaaaagagttaaatacttacattagggccaggtaggccaacaactatcagagaacaacagcggaagacaaaataatataagggcccggttaacatgccacaggcagtcgactggggaacgagacctagaacaagaccgcactccgatcatcttgtgggatacgcaagcgtaccgacaagggcttctcttcaacactctcctaaaagatatataaatagcaagggtgagtaccaaccgtactcagcaagccaccacaacaacaatgcatatgatagcgggtatttcaaggaatggcttcaggttcttttgcataaagctaattttacaattcttttcacaagcctaaaacctagcatagactgatcaaattttagtaccagtgttcactttaaacaacgacggttctgtccaccatccattgtgatcccaaggatagcttcccgccattgattcgtcatggttttctgaggacgtccaccttcccgcctctcaggaagtggctccatcagcataaaaatcatcatgcaatatcccatcccacacacgttaaagaatttagagtctagccaagtataatacatgtcccggtgctcaataaccgcgagcacggctattcgaatagatttggtttactcacactgcagtggatgtacactttacccgcactccgcgactgcccaacacatgagcctcgtcccaacacatgagacgcgtcacggcaaagcttttcgataacctcgcattggcagtacccgctccatgaacttaaatcctcatgcactctaggcgtccatgtttctagcagtgagaggagttctggcgctcccaggaaagagaagtctcacacacatattaaattatggttcaagttaagttctctctctcacacactcatggcagtcctaccaatggcgacaccgatgtagggcacgcctcttggccctacctcaacggctgtcccatcgtagcgcacctgcctcactcaggggtgaaccatctatgcagggatactgcctccgctcggctatctaatccgctaggtctatacccattcgagaagtacggttgtacgggggtcgtttcatgcttaacttcatggctcggtccttaattgaccggggacggtactagccttttccagataccacccaaatcctccgtccgccccagtcgaaaatagttgtttaattttatttctcctttcacaaatcatgtcatcaacatcatggcaatgtggcgctcatgtctccacatgccgcatctcaattaccttcccaaaggtaattgcccaagcatatagcatttgataaatatgagtatgcatgattctagaatagcatttctaagcaattgtcataattgactagggactcatacgtaatcatgggtacaaggattttaagggtaaacaataatcaaggcatggcataatcacaagtaggacgttcatcattgcatgcaattttatttgtaaacaaaacaatttcgcaattaggatcaacatgttcaacgaatagtgatgacttgccttgctcaggatagtccttattcttgatataattcttgatcaaccttcacctcctggaagttgctgacgttgcctcacgactaaccgatacataaattctataatacgcaagaaaaccaatattcaaataacaaccaaatatgcacaacaaaatatactattcatgtctgctaatggattccaatctcgctaggggctaaggtttcttaatctttctattgtcaacgtggcctatttaggagttaaccaacatagcatttataggatacatatatatttggctaatcggtggtttagtctatcaaatggctatggaaggattatggctaggcatgcatttatctacatagcacggttatacactagaggttctgttgccggatggattttggatcggtcaaataattactgtgaatcatttgtattattattttattaatggaggctttattttaattatgtacatatttcacttgtcaaaataaattataaaaggttaacaattacccatgctttgtatgttagaattgtttaggttaatcatattatggttacggattatcccatcacataattttacaatgaataatccaaatttacagttgatctgtaattatacgaggacaagatgtataactagtatttatctaatattcatgtttgtcatatactccctctaaattaatatatgcaacaagcaaattaatacgataccatatatctataatgggatgtacaatatatgtgtgcacaatatcttaatatattgaatcatttatttgaatagtttctatttactgcttggttaactaagggttgctcacctctcctactatatgctattatatgggatatgtcgttgattaatttcatatagatgatttaatcacactagctctgttattatttgccataaaaagcttaggaccgatctatgtgtatctatattttacttacctaataattataaggctaactctatttaaataactaataagtcgaatgcgaaagtcgattcctttttattaactttactatctgcgaactacggcaaacccaatttcgatttaaactattttgcgggtataattatttcgttgtcaataatttactctccccgagcattgtatataataggttagaaatttctattacaagctaaatattggacgaaatcctagaaatattatacaatttaatttagtctatgactaaacgattaaatataatacacggctaagattcctagaaattaaatccgaatttctatcgtgaatcaattacttatagagattacccaaaataatctataatagtctataagaattcatctaattgtttagttcttaaataattgatcctataattaaatgctagtattctaggtatttaaatagcaagaattcatctagctatattgtcattaagcctatgattaaattctaatatttttaaatattttaaaattcccccaaaatttttcctttcctttctccctctttcttttcttttcttttctcttttcccttttcctttcttttttctttctctccctttttcctctcctctctttccttttctctctctctctccctttttctttcttttctctctgtcggcctctcttctcctctccctctctctctcggctctctctcccacccgaacggcggcggcagtggacgcgagggggaaggagggcggctcaccggcggcggcagcggcgacgacggcggcggcgacggtggcgcacggcggcgcaggaacggcgacggtggcgcacggcagcacgggaacggcggcgcggcggcacgagagcggcggcgcggcggcacgggaacggcggcgcggtggtacgagagtggcagcgcagtggagagggaagaggggaggaagggtgagatggggtgggggaaaattgagagggggggggggtatttgtagagaggggagaaggagagggggaggggcggcggcgtaatggcggcgctcggggcgggacgatggcgacgcgcgggcgacgacgcgatggcggcgcggggctcggagcggcgatgcgacgggcggcggtgcggggctcgagacgggcgacgtgacgggtggcgtggggctcgacgcggcgatggtgacggcgcgcggcgatgggacggcgacgcggcgggtggcgagcgagcggcgcgacaggcgaggcgacgtgacgcgcgcggcggcacggggctcggcgcgatggaacgggcggcgcggcagtggcgcagggcgacggcgaggggacggccgcgtggcggggcgcaggcgcgaggggacgggcgcgcggcggttcaaggcgcgaggccgacggcgacgcgacggtgacggcgcagcagcggcggcggcgcgcgcgacgggcgggtgatgacggggcggcagcggtggcgcgcggcacgaggtgggacgcgacggtgacggcgacagcgcggcagcggcggcacggggcgcaaggcgacgcgacgggtggcagcggcgacgcgacagcgggcggcgcgggccggggtgcgatgacgcgacaacaacggcgacgacgacgcggcagcaacggcgatggcgcgcggtggtacgaggcgcgaggcgcgacggcgacggccgagcggcgcgcggcgcggcaggtgacagcggcacggcggcaggcggcgatggtgactgctcggggcacgaggcgcgcatggcaggggaggggaaggggctagggagcctcgtcgaacacctagagtgcaatgaacagtgtctttttcctatttatcctgattttagtttatttcccatataaatttgattctataatttctaaatcttgcataaatgaagtttactcaatgtttgtgtcattccaaccaatggatttattctagattaatattactcatattttatttatataatttatttgaattcttaattagggttaattcttattattattatatattttcctgggttttcctatttggttgatttgctattcaaatcttgtcccataaattctaaatttcacacaattgatgtttacccaatagatgtgttaatttagatggaagtttactcaatttctaatattacccatattttatttttatatatatttttctattgcattatttaaatgaggtataattccaaaattaacctagataattttggaggctttgagggttccaaaattaattaaaatatcctaatgtggccattattattgtacaatggtacattgaatgaacttatttgtataataatatattttacgtggatctagtaattctataaatataaattgagactcggtacaacattaatctaattgtctaattaaacactcacatattcttatttatatataaagcttaatttatctacatgaccattattttatatgagtgattttcatgtcatgaggaactcggcgacatgttgcaagtatcaatctatatatattccggtgaattacttatttataaacacgatcactatagtggtgatcatcatttcatgtgttcttatatttcatgtgagattcgattcaaatgaattagatttaatcttactatttctttagctaattgtgacatcaagctatcaatcatggttcgaatatttaatacctaatttgtaatttgtaatagaaattaatatttgacttatctatcttgtgcataattatttgtaggattaaatatattctcgtaaatcatatctattgcttaaatgtagttcttttctttaccttcttggtgatcatttatggtttggcaagcaataggaatcataacaaccagcatgatgcaaaagttttaaaaagttcaaaattttagtcatttttattgtattgaattttcaggatgttacaggcggccgcctttatcgccgcccgttccctccccttcctagccaccgcttagcgcagccgccttcgcgtcgccttttgcgccgtcgccttcgccgccggttgccgtcgctggcaacgcgttcgcgcgcgcgccgtcgccgtcgccgcggccggtcggccggccttgagccaagccgagccgggtgccgccgcccctttcctcccgagccgctgaccagtgggcccgcgtgccggcgcccttcctccctctcccgagccactgaacggtgggccccgcatgtcggcgccgcttcccttgtgctgacgtcagtcctggaaaatattgcgcaataaattatttaaggatttctgttatagtaataaacacagtgaatcttctaaaattcataactaattcatccgagctccgtttaagcccattcaagtctcagtaaatcaagaaaaatgtgtagaatccgttaaaaatggttttgttccctgtttcagcagtcttatagcttgtatgcaatgtttgctttgtatgtcgctagattccgattcctccgacgctccggtgtacttcgagatagtcgccgaggttcctccagcagcagagcaaggcaagtcatgcttgtcacttgaacatgttgatcctatattgcaaatgctctattgttttcttccaaatattgcattgttttataatattactatgggatggttacctattgttacagccatgtttttttggataccatgctcctttgttagcttggggttataacatgattagagtttggactaggaattgcctagacatgcttagttcaactagttcacaatggggaaaatcatattaatgtttagactgttggttctaatggttttgttggattagtgacaccgctttggtgttggttaattaaaataaatcacatggtgggctgtgggtgcatggttttgctggtcgcacccatggcagttaaggaccggttcgcgggatgccctggaagaacttaacgtacttaccacaagccagcgtgggcaacggctgggcttgtagtgtagctttcctctagccgacgcatccaggcaagggtgggcgtgatggagtttggatgggccctgcgacggcctatgcggcttccggattcacctaggcacgagaggggactgcccgctgccttgcgaggagtgggggtgaaacctgaggtgtggtgtgcttggttagagggggttatgcgaatggtcctgtcacggcctctttccggtatgtcgtggtgacatgtcggcgcacggaaacgtgtcgtggggctgtgtcttgtgggtacagttgtacacctctgatcagagtaaaactattcgaatagccgtgcccgcggttatgcgcggtcaaccagattcaccgtgattagtctcaccttagtgtaatcttttaatttggatagtttaggtggatggttgggcctgtcgcaacgtgggttagcgttggacagtggatagttgatgttaattaattattacaactgtttaaatctttcaatttctgtttataaatgctcgctttatgcaaatgaaccactttagctcttctttgctgattccctgcaccatacccctattccggtatgacttgctgagtacagtgggtagtactcagtcttgctctatttttcctaaccccagagttcgagttcgggtcagatgaaggtttccccgaggagtaggctttgtccgtgccgtcgaggatgcctgtggagtggtgttcccgctgcagttttagtcaaggcttagctcttgttgtctttcttttcttccgctgcatttatgtaagacttttatgatgtttgtaagacgtggatctgaatgtcaacattgtcgtttgtgtaccccggctggtcctggacggggattctaatgcacattctgcttggaattctattcgggaatttctgggcgtgacaagttggtatcagagctgaccttgaccgtagaacaagccaaatggaaaaacctaagagccctctgaatccttttcattgcatatgttctttgcaattggatttgttccgggaaaattgggatctgttcttgtggttcaggggaaaaatcttgtcgctcatttaagtgggatttgccaaaacgagtcagtctagggttttagtaaaactattgagatttattcgtcagtcagttgggatttgatgggtgaaatgcattaggtcctagctcagtaacatgggttgcaaggtatttatgctttgtttgttattattagtatgtatctaatttctcattattttatcgttatgtgagtctgtcttatttattcgctctcatgcaaaatgatctatgcataaaaaatttcgcttttattcgattcccttatttgagtcttttattgctttatttaaatttggatttgagcatgcattgatcctactcctttgtcttctctagatggccggtcacccacccaaccaccgcggagaaggcatgattgattttgtggcagagttggcaagcatgacgctggtggtaggctaccccaacgcgccagagtacacgacgattccaccgctcagtggcgagcttcctcaccgtgttcgcttggaggtccacggctacgttggtacctgcctagccaatatggtggttaaggcatccggaggctcagcagatcacgcctgtcaggaggcagcatacctgatgatggccagactacaggagcgccacaactacatcttccacgacacggcataccggtttcaccctcgtcgagccagcaatgatgatgtcagtaccttccgtccgacagctggcaagaacgacaccacctttggtcacatgtgtgctgtgatgaggggattggataggatgcactcggatctgcaccaggcgaccaaggccttgaacgatgggaagctcatgaggatcgtcgctctgaaggacgagatagcgcgcctgaagagggagaacgctcagttaaagggtcttcccgcgccaggaggagtccggatccgcactacgccccgcaagactacgacggcacccgtgcgcgccagcttgcgcccaggaacccacctccatcagcagctcccgcagcacctccagttccgcccgcagttcctgcagctccagctccagctcccgcgtccgctctctccttcgctccagcatcagccgccagaggtccagccagtggcaccggaggttggttgtctgctactcccagtggcagccgcgatctcagcagcagcagctccagtggctcacagtcaggcagcggcgagacttatctgccaggctccgagagtcgctcagagggacctggtgacgagcaggaggacgccttcgactccaccgaccgcaggagccgctccgagcattaggctcgtttcccattagtttatcgactgtctagcttctgcttgttagtttgtgtgtttaggttgcttgtttggggtcagtcgacggtcgatatcatgtgcctatgatatggctgtcttaataaggatttttgcttgctttttaagtgttttaattcagatcagaacaattgcagtttaaattcctatgtaataaagcttagtttctgagcatctgtttttcttcttttccccgtctgcttttacctccagatggtctacaccaggaatggtagccgcgcaacaggcgagggcagcaacggcgaagagcgcactgatggggcgcatccccacagcgattccggcaatggtccgccaccacttcccgagaatccgacgctagcccaagtgatggcacatcagacacagatgatggcagccatgatgcagcagatgcagcagcagcaccagcagatgcaccagaggatgctgcagcacgccgaacagcagcaccagcagtttggtccccctccccctcagtccaagttgcctgagttcctacgtgtcaggccacccaccttctccagcaccaccaaccctatggaggcgaacgactagctccatgccatagagaagaagctgaatctcctgcagtgcaatgatcaggagaaggttgctttcgccacacaccagcttcaaggtcccgcgtcagcttggtgggacaatcacatggccacccgcccaccaggtactgaagtcacttgggcagagttctgccgtagcttcaggaaggcgcaggtgccagatggggtcgtggcacaaaagaagagggaattccgggcgctccatcagggcaacaggactgtgacagagtacctccatgagttcaatcgcctcgcgcgatatgcaccagaggatgtccgcaccgacgccgagaagcaggaaaagttcatggtgggtctggatgacgagctgaccaagcaactgatatctggggactacgctgactttgagaggctggtggacaaggcaatccgtcaggaggatcaacgcaacaagatggacaggaagaggaaggccgcacagttcagggcacctcagggaagtcaccagaggccgcgcttcgctcccgggcagcagggtggacctaccaccatgatcgtccgccagtaccgcccgttcaatcctagcaactttcctcagggcgccagtggcagtcagaaccaccatggaggtcagcccaaccgcggtgcagctccacgcccaccaatggcaccggcacagtcaggcccgcccgcgcaagccaagaaggagactggagcaaaaccagggtcctgcttcaactgtggcgagcttggccacttcgctgacaaatgcccgaagcctaggcgtgccgggccaaggtttatccaggctcgtgtcaaccacgcatctgcggaggaggcacaagcagcaccagaggttgtactgggtacgtttcctgttaactcaatccctgcaacagtactttttgattctggtgcaacgcattctttcatttcaaagaaatttgtggggatgtatgggttaaggaaagaagagcttagcacaccaatgagagttcataccccgggaaataggtcaacctcagtcagttttagcccttcagtgctaatagaaatccaaagatcaccatttctagccaacctcattcttctcgaatccaaagacctagatgtcattcttgggatggattggctgaccaagttcaagggagtcatcgattgtgcgaatcacacagtcactttgaccaacgagaagggagaaaccgtggtgtacaaatcactagtctcaccaaagcaaggggtctctttgaatcagattgaagcagaaatcccagtggacaccgtggagaagaacttgaggaaattggaagatatacccatagtctgcgagtatccggaagtgttccccgaagacctcactaccatgccacccaagagagagattgaattccggattgacttggcaccgggaaccgctccaatttacaagagaccgtacagaatggcggccaacgaattagccgaggtcaagaagcaggttgatgagcagctgcagaaagggtacattcgaccaagtacttcaccttggggtgctccggtcatttttgtggagaaaaagataagacgaagaggatgtgcgttgattatcgcgcactcaacgaggtcacaatcaagaacaaatatcccttgccgcgaatcgacgatttatttgatcaactgaaaggagctaaagtgttttctaagatagacctgcgatcaggctaccaccagttgagaattcgggaagaggatattccgaagacggccttcaccactcggtacgggctatatgagtgcacggttatgtccttcggacttactaacgcacctgcattcttcatgaatctgatgaacaaagtgttcatggaatttctggacaagtttgttgtggtattcatcgacgacatacttatctactcaaaatccgaagaagaacatgagcaacatctccgtctggtactcgagaagttgaaggagcaccagctatacgccaagttcagcaagtgtgacttatggttgacggaagtcaaatttctgggccatgtcattacagcccagggtgtggcagttgatccgtcgaacgtagagtcagtcaccaagtggaccctaccgaagatcgtgtcgcagattcgaagttttctaggactggcaggttattaccgccgattcatcgaaaacttctccagaatcgcccgacccatgactcagttgcttaagaaagatgagaagtttaaatggacagctgagtgcgataagagttttgaggagctcaagaagaaattagtatccgcaccggttttgattctgcccgaccagatgaaagacttccaagtctattgcgatgcatcccgtcacggacttggatgtgtcctaatgcaagagggcagagtggttgcgtatgcctcacggcagttgcgtccacacgaagggaattatccaactcatgacctggaattggcagcagtggttcatgctttgaagatctggaggcactatctgattggcaaccgctgcgaagtatatacggaccataagagtctgaaatacatcttcacccaaccggacctaaatctccgacaatgaagatggttggaactaatcaaagactatgacatgagcattcactaccacccgggtaaagccaatgtggtggcagacgcgttaagcaggaaaagttactgcactgccctgtgcatcaagagcatgtgtgaggaattgcggcaggagtttgagcatctcaacgtgggaattgttgaacacgggttcgtagccgctctggaggcacggcctacgctcgtggatcaagtcagagcagctcaagtaaatgattctgaaatagcagagctaaaaaagaacatgagagtcgggaaagcccgggatttccacgaagatgaacatggcacaatctggttgggagaaagattatgtgtacctgacgacaaggaactgaaggatctgatactcaccgaggctcatcagacccagtactccattcatccaggcagcactaaaatgtatcaagacctcaaagaaaagttttggtgggttagcatgaggagagaaatagctgaattcgtcgcactctgcgatgtttgccaacgagtgaaggcagagcaccaaagaccagcaggtttactccaatctcttcaaatcccggaatggaaatgggaggagattggaatggactttataacaggactgccccggacatcatcgggtcacgattcgatctggatagtcgtggatcgactcactaaggttgctcatttcataccagtacataccacatatacgggcaaaaggttggcggagctttacctttcgagaatcatgtgcctacatggagtacccaaaaagattgtatccgaccgagggagtcagttcacctcaaaattctggcagaagctgcaggaagagttggggacccgtttaaatttcagcacggcctatcacccgcaaactgatggtcagaccgagcgagtcaatcaaatcttggaagatatgttgagagcttgcgctcttgattttggtggagcttgggacaaaagcttgccatatgcggaattctcgtacaacaacagctaccaggccagtctacagatggcaccgtttgaagctttatacggccggaagtgccgcacacctctcttctgggatcagataggcgagcgtcaactgttcggaacagaggtattagcggaagcagaagagaaagtcagaatcatcagggaaaggttgaggattgcccagtctcgacagaagagctacgcggataaccgtcgaagggagctcacttttgaggcaggagattacatgtatcttcgtgtcactccgctccggggagtacaccgttttcagaccaaaggcaagttggcaccacgcttcgtgggaccatacaaaatcctggaacgaaggggggaagttgcttatcagctagaacttccatccaacatgatcggcatccatgacgtgttccacgtgtcccaactaaagaagtgcttaagggtacctgaagaataggctgattcggaacacattgatatccaggaggacctaacatatgtggagaagccggttcgtatacttgataccagcgaaaggagaaccagaaacaaggtcacccggttttgccgagttcagtggagtcatcattcggaagaggaagcaacctgggaaagggaagatgagttgaaagccgcccatccgcacctcttcgccagctcctccgaatctcagggccgagattccgtttaaggggggtaggtttgtcacaccccgaagttctcctcccaagcctaaaatttaatttttaaaacgaccccaagaaaatgcaggtgaaatcaagagaaaaccctaagaaagtaatgcaaataataatcggatttgacatgtgaaatttttcttgagttctacatgtcgaaattcattaacaggatttttagtggaattttcagagctctagaaataattttaaccaattaaaattgagcaagcaatattttaattccagggaaaatcctttttcctttttctttttctttttcctctcttttcctctttttccgaatgggccgccggcccattctctcctttctcccccctccctgctgggccggccacaggccgaggcccagccaggccgcccgccgccctcctctctcggggtcgccgacaggtggggcccacctgtcgggtccttcccccacctcccgccgctcccggcgcgccgccgcgcccgcaaccgccgccgcgcccacttcttcgcctccttcgggccacgtcgaccacgtctgcgcgtgcgccgcgtctcccgcgcccactcccctctctctcccgcccgcgcccgcatccgagatggccgggattcgattttcgaatcccgcctctctctcctcccccactccccacgtcggccggcgattcccgcctctcccggccacgtccggttctctctctccctatttaatcttctccgtcgccccctctcgctttttccccatttcgccgacctctcccgagcctcccatcgctcccgcgccgtgcaacctcttgccgccgccgtttccgctactccggccgtcgttagccgccgctagggtcgccgccgcaccacgccgtcttcgccgtcgggttcgcaaggctaagctccaccccggccgccccttccccgtcgagtttcgtcgccgaaattcgcctcccctcgcactccggtgagttcaaccgctaccgccgctttcggccgtgaataccggtcgccgtggttcatctccctctctctaatccttctcttctccttccttagggcaccccgaagctcgtccgccggttgccgttatcctcccatggcttgccgtcgccgttcgccatcgtcttcctccgcgccggccaccctcggtgaggcatccctcccctcttttccccttcctctcctcctagtgccgcgccgccgcttcaagttgcgcgccgtcgccttcggccgccgccgccgcctcccgtgccgccggtcgccgccgtcgtcggccgcatgccgtcgccgctagacctggccggcaggtcggctttgatgccgagccgagccggcggccgcctttatcgccgcccgttccctccccttcctagccgccgcttagcgcagccgccttcgcgtcgccttttgcgccgtcgccttcgccgccggttgccgtcgctaacaacgcgttcgcgcgcgcgccgtcgccgtcgccgcggccggtcggccggccttgagccaagccgagccgggtgccgccgcccctttcctcccgagccgctgaccagtgggcccgcgtgccggcgcccttcctccctctcccgagccactgaccggtgggccccgcatgtcggcgccgcttcccctgtgctgacgtcagtcctggaaaatattgcgcaataaattatttaaggatttctgttatagtaataaacacagtgaatcttctaaaattcataactaattcatccgagctccgtttaagcccattcaagtctcagtaaatcaagaaaaatgtgtagaatccgttaaaaatggttttgttccctgtttcagcagtcttatagcttgtatgcaatgtttgctttgtatgtcgctagattccgattcctccgacgctccggtgtacttcgagatagtcgccgaggttcctccagcagcagagcaaggcaagtcatgcttgtcacttgaacatgttgatcctatattgcaaatgctctattgttttcttccaaatattgcattgttttataatattactatgggatgtttacctattgttacagccatgtttttttggataccatgctcctttgttagcttggggttataacatgattagagtttggactaggaattgcctagacatgcttagttcaactagttcacaatggggaaaatcatattaatgtttagattgttggttctaatggttttgttggattagtgacaccgcttttgtgttggttaattaaaataaatcacatggtgggctgtgggtgcatggttttgctggtcgcacccatggcagttaaggaccggttcgcgggatgccctggaagaacttaacgtacttaccacaagccagcgtgggcaacggctggacttgttgtgtagctttcctctagccgacgcatccaggcaagggtgggcgtgatggagtttggatgggccctgcgacggcctatgcggcttccggattcacctaggcacgagaggggactgcccgctgccttgcgaggagtgggggtgaaacctgaggtgtggtgtgcttggttagagggggttatgcgaattgtcctgtcacggcctctttccggtatgtcgtggtgacatgtcggcgcacggaaacgtgtcatggggctgtgtcttgtgggtacagttgtacacctctgatcagagtaaaactattcgaatagtcgtgcccgcggttatgggcggtcaaccagattcaccgtgattagtctcaccttagtgtaatcttttaatttggatagtttaggtggatggttgggcctgtcgcaacgtgggttagcgttggacagtggatagttgatgttaattaattattacaactgtttaaatctttcaatttctgtttataaatgctcgctttatgcaaatgaaccactttagctcttctttgctgattccctgcaccatacccctattccggtatgacttgctgagtacagtgggtagtactcagtcttgctctatttttcccaaccccagagttcgagttcgggtcagatgaaggtttccccgaggagtaggctttgtccgtgccgtcgaggatgcctgtggagtggtgttcccgctgcaggtttagtcaaggcttagctcttgttgtctttcttttcttccgctgcatttatgtaagacttttatgatgtttgtaagacgtggatctgaatgtcaacattgtcgtttgtgtaccccggctggtcctggacggggattctaatgcacattctgcttggaattctattcgggaatttctgggcgtgacaatagtcatgggtgtcttccatggttcctcttagggggcttgtatttatacccataggtgtccccttgtccaagtagaattagggaaaccaatatggatacaatccaagtagtccttgttgtttccatgtagaactctggttgtctttccttatccagaactccctccatatctgaagtcagtttccgtataagacatggtatgtggtaggtcctgccgagatttagtcaactactattaggtatgtggtatccataaccatgatagtagcccccgacttcaatgcaaatgaacgaattcatattctcaaccgcgcgcagacattggagtaactgttatcgagctcatgtgaccgttctcggtgaatttagagataacgttggacttcctttgtcagcctcgtgcgggcaccgaaaaggtttgtctaagtcaatctctgatgtcgatcgagaaagtacagagcgtacgactaagtctcccgtcttgctgtagtcgagaatttggattgaagtcaagaaattttatctcggcgggtacaccatttcttcattccgtattccttgtcgagatccagcaaccgttctcaagcgatcgagaaggcgtggagtctgcgacgaagccttgtcgacattggtcgtactcgccttagtcgatcttggtgtagaaccatagagacatagagtcttcgtcaatgtcgaatagaattttcttgaaatcaatactcagaaaagaatatcaatagaaatagcccccgagcgaatactcaaagggtgacatgttataatatgtatggtaaattgaaaatgaattaaatttatcgaccaatgttttgtgtaagagtgtcttctcagttcacgactttggtcagtcgttcgagttgtacactctccctagcccctagccttgtcgtcggagaatcgttctcggaggagaaggctcttggacccttgacctgccttggttgaatgagcactgatcctagcccccagccatgaagttggaaaagtcaatttccgattacacagcttggttaatacgcacggcgagaactcttacacgaccagatcttacatggtctttcgtctctaaaggatccgacaaggccttatcggctctgggtgtccccagccgaagatcccttaggttcctcggaggccttgtcaagacggcgtaaagggatagtaagataggtttcaacgctaggtgtcgtcgtggtaagggatctctgggtaaaacacttggcgatattgtgtacctgctatcaactttgttgaagtagaagtagtaggagagtcactacaccgctggtcgaggaccaggcagtagccgtatctcgaccactgaaagtggaagtagtcggaggaacactacaccgctggtcgaggaccaggcagtagccgtaactcgaccactgaaagtggaagtagtcggagaaacgctacatcgctggttgaggaccaggcagtagtcgaaactcgaccactaaaagtggaagtagtcggagaaacgctacatcgctggtcgaggaccaggcagtagtcgtaactcgaccactgaaagtggaaatagtgggagaaacgctacatcgctggtcgaggaccaggcagtagccgtaactcaaccattgaaagtggaagtagtcggagaaacgctacatcgctggtcgaggaccaggcagtagccgtaactcgaccacttgaagcaaatgtgcgagagatcactacgatcaactggttgagaaccggtgagtaggtgtccctcgatcattttgagtcgtggtacgaggaccgctacgctgccggtcgaagaccagtcgtagctgttcctcaaccatctgaagtcacagtgcgaggaccgctacgctgccgtagtcgtacctcgaccatctgaagttaaggtgcgagagattgctacgtatgcggtgtgagagattgctgcgtactagtgcgagaaccagtgagcgagcggaattatccctcgaacactgatggaaggtgcggtgtgagagattgctgcgtactggtgcgagaaccagtgagcgagcagaattatccctcgaacaccgatggaaggtgcggtgcgagagattgatgcgtactggtgcgagagccagtgagcgagcagaattatctctcgaacaccgatggaaggtgcggtgcgagagattgctgcgtactggtgcgggagccagtgagcgggcagaattatctctcaatcaccgatggaagctgcggtgtgagagattgctgcgtactggtgcgggaaccagtgagcgggcagaattatctcttgatcaccgatggaagctgcggtgtgagagattgctgcgtactggtgcgagaaccagtgagcgagcagaattatctctcgaacaccgatggaagtgttagagttggtttattgcaagtgtatctcatgtggccagcatgactcacgtacccaacttatagcatacccggatgtccgttcgcaatcatgtcgggtgatcaagcccgtgacgttcgcgaggaattatccgttaataaccttttctcgagtagtccagccatggccagtgctatgagataggtcgtcggtctttgttggtaagttgggtgcgataactccgcatttatcgagaatattctcgataatggagtgtactcgaccataacctactcaagcgctcaattgttcctgaaagatattttctagaaggcaagacatatagcagagaatatcgagtatgtactcaaaaaactgcatggagcttctattattatcaggatataacgagcatatgtaattatcaggcactatgtaaaccgtaaataagcatgatttatacagaagaaaacaaagcgagcccccagcgttagaccgtggttggcctaacatcggaagcactcgtgcaacggagattgtataagaaacatgctctagtaaacataataaattatagacctgacaatacggtatgatctgaataggtacaataaattatatataaaatattgcgtacctgtagatatacgccagatatatctacgaaattagtagatcaattaagttaattaacctactaattaccttgattagcttttgtagtcgatctgaactcttctctgtatccatgattagcatgtacgggtggcttgtatgggccccacagcatgcatgctaatatatgtgtcaacacgtgatgtagtcagccgtcttctcgtttggctgtccggctgctgcacttgagatcgatccaatccgaccacggcaagataatacaggcgacatgtagtagtattctattttgtcagtagcactttgtgtctgagacggaacaatccagcgctcggcctcaaagcggtcggactcggctgacagtaatatggcagaaagtttggcgaggacgtcatggcaaaaaacattgaattaatgttctccgcgacgacgaggttagtcgatccgtggtgaagcatcctgattgataacctcgaaacccgcggcggtgacatcttgaagcttggtcgatctcgagagatcgagttgttgatgacgatggttccgatcttgtcgggagacatactccggtcgggttggatttccccacagcgaagtcgtcgagtagcttgttgtcggagaatccatctcttaaacccatctcgtcgaaatcctgaagcaccaaaatccccctacctggtgcgccactgtcgacgtttgatgtcgtcattctggtatttgcatagtatggggatcgtcggtcctaggatatatgcgagattgaggtaaaagaggtggagacagggatttttatacagattcgggcccctgagttgtcaggtaataaccctacatcctgttggccggagccggagttgcttttattcaccataatcacaccagtacaatatgtgggtagcatatctaactgttgtcgacatgtcgggtctgaaggtctgactcgtagtcgacaacagggtagccttcctcctcaaatccttgcccggcgagatcagagatagcgctttcgtatctcctgacggtatccggagacaccgtaggggaatagccatgcctatccctgaagtcgatatccggcggcgtgtcttggcttacctaggcttgtatgttgtggcttctggtgggcgtgtgttgatagtcatgggtgtcttccatggtttcacctaggggacttgtatttatacccataggtgtccccttgtctaagtagaactagggaaaccaatatggatacaatccgagtagtccttgttgtttccatgtagaactctggttgtctttccttatccagaactccctccatatctgaagtcagtttccgtataagacatggtatgtggtgggtcctgccgagatttagtcaactactattaggtatgtggtatccataaccatgacagtagatatcttatataatctaagacaacgtcgctatttaacctaatcgactgccttttatcaacagatgttagccgattgtaggttagatgacgataatgccaaagattatgtaaattatgtgataacttgacgaattatatagacaagtttagagtgtcataaagatggaagcactaatcccgagaacacaagccgtcataacaagttttacctctcgttgaagatcgaaaccgatgcagctcaacccgaaagcaagaactcgtcgaaataaaactaaagcaaaaaggtggcgatgcgccgagattgtattgaatgtgtgtgttaaaaattacatagagctcggggtctatttatccccgagaattacaagatatgtccataccggacacgaccactatctctaacaaactctaagataccataagtctttgcggcagactttttttcaaacatatctctaaggaagttacataaaacatcctaattaatagatgcaattgccttctcaggactctatccatgtgcggcaatcatcttgaagcacctcaattcaacccaatgtcatacaccaaattatactgtcagaatcggctgtatcggctcacctagtccgactcagacccagccgatcctaatcttagccgatctggacttcagccgattcttgctctgttctcggatcaatctcctccttcgactccaccttgatctaatctccttttccgatactgatattaccaaatttggtcgttaacacatgccccccaagtccgggatatttgataatatttcggatttgccgtgtaccgattccgagcaagtttcgcactctgccgttttcgaccgttattctatcgctttaaataccaactgttgccctaaaaaaatctcacgccgtgacttccgttttcaccacccaagcgaaattttgtcctttctctctcaggcgattcctccgacgcaaaattgatccccaggcgatttcacttttgatcagatctccgcctgcggcgatgtcgtcttccactagcctgtctattgcgccatcgaccgagtacgctgagataagttctcaccggctagatccctttccctcgcatgaaatcgatttctccttttctcattatgttttctgcttcccgattcctttggatttgcagcacctttccaacctagttgcggttcccagcctatcgcacaaaaaccactattttcttggcccaatcggcaatcttgaccccactgatttcatcattggtgaaatcaacagaatcccctttagactagccaaccctaacttgagtcactggaagaatactttcaagtcttggccatctctcgaaaagcctacccctgataagagctggaccacctggtaccaacacatatcggctagtaagaaaacctactgggatgagattgggatcagccaagcgctttctctcaccatagccaattctgctaaggatgaacctctgatggctgccgccacctatttctgatccaacaccatcaatgccttcttatttaaccaagggccgatgactccaactttgatcgacatcatcatgattactggattagatgtaacttcatcggccaaccctatgagtatgaacaccaagaaccaatttgacttcaagaccaaaagcataggagggtggtctggttatgtagtggcatacatgggcaaagggcctgtcactcctcgggagcacgtagctttcttgctaatgtggctagaaaagtttctcttctgtggatccagctatggtcccacaaccaattggcaatttgtagacgaagccttagaatcaaagaaacaatttcctttgggcaaaatccttctcggctatctataccaaatgttgaacaatgcatcggctaagatagccgtcggctcaatagttggagcaggtagaccatggtggctactgcagacctggctaaacctggtagtcatgaaagttgtcaatcggccatctgtaacagaagctgaattcccaaggttggagaaaattgtagaagacgatggagaagaacgcacctaccgcagatgcatgtcatatggagaatatgcatccacaccagccgatgctggggcaaaactatcggctgagctgctcaaagattggttctgcagcttttatgaaggcctccagaaagatgcccgagtttggtttctttatgaagactcagcagaccttgagctcccattacacttcagatttgaagacatcaatcatgaaagatatcaaacgtccagggaagtctttatagctgcaatcagtccatgcatcctacctgtcggtattcaccaaggaagaaatatccaagtctcctacgaattctatcaccctacgagttcagctagacaacttggatttggccaactcccaatcggcttattctttgctgacaagatccaatgccgaggagaaatttcttcaactctaatgatggatcgactgcttaacctccaaggacctcccttaggcagtatcgacaatattgagtttgcaggattcaggagcaggaactttgacagatggtggggtgaatggaagttgcatctatttcatcaatcggccacaatgtacatgacagatctattccctgacgtcataccccaggtaaactttgtcatcactaaatttcataacggtcagccgattcattacttgactaatcttttgtttctattttacagacaacataatcctcccctccacatcagagcaatagtggtaggaacattgaatatgccccaggtctgattcctaatggaggcggactgtctccccctatcatcggctatcacgcccccaaggtctcaaccctcctccaaggcgccatcaaggaaccaaccgatgtaaccaagaaaagaaaaactagatcatcggctgtgagcaccttgactctagctccaaagaaaaaggccaagtctaagaaaaccaagccaaccgatgacctacctgctttggatccatccattgaacaagctctggatgaagaaaatattgaggatgatgttgatcaggctgcagccaaagtaagtgacactgaaaaaacaccatcggcttcgcctaagcagataccttcaactccttctgcccctactcacttcttcagagtaaaacatctttccttgcaaacccttttgtaatcattattttccagccgactactcataggttttgtagttgtagaagaagaaaactgctataaagaagaaatcggcagcaccaattctcaaaccagctccaccagtaagacactctcaattttactagttgatttcagccgattttgtctaacacttgtctgtttacagcctcctcctcctccttcttctcctgtacaacaatcatcgagtgaccgaactccatcggccgtggagagtcatcatattgtggaagaagaacaaccggctgctccttctatcccagtaagttttcctttgatgcaataatttagatcgactatattgacttagctctcaaactttctgaacttatacttgcaggctctagccgatctcttttcttttgatatcaaagattatcttgatgaggcagaagaagatacttcaagcaaagctcaagctccattatctgacgatgcaaagaaaacacttgaagatatctcgcgtcggctagaagcctcttctctggatagcttagtggtcgactgtggatcaattaggacacgattgcacgaagttgaagctctaattcctaaagaactggccggtgtcctaactccagccgcttatcttgagcaacatcaatttaaactagaaaaagccaagctaagattagccgaatgccatgagcgtaaggagattgaagccacaatccaagtcaatcggcagcttgtgcatgaagaaaaagttaaactcgatcagctatctaaaggtccgatcaaatccaatatcgaccggcttgaagcccgcaagatcgatctcttggcacggcttgaagaatgcaatgctgaattggatatggagcacaaaaagctagccgatctcccaaaatctgtcgaagagcaaaaagcaaggctcaaatcggctatcaagaatgttgctgacctaaccaagtccctgaagatcattctcgggactaatgctcatgatgcccaagccattgaagaagtcgaacaaattaggcaaagagctatttcagctatctagcagtacttgtctcaataacttttgtgtaataagacttagaaattcttgtaatcggctaagataccttaataccctgttgttttaacaatcctttgtgccgattaacataacttctaatttttcattatttttcattttttgtatatatgtgcccccaattttataatgtcaacaacattgataaaattaaaaacaactaagggcgatataacaatatcggccgttatatatcggcaaaccattaccgatgacaattagaaaaacgactaaggacgatataacaatatcggccatctcaagacgatgtaaaacacatcggctgtcatgcatcagcaacactagccgatcatgcgtcaacccaaacacttgggtaatacttcttcaagtatttgccattgagcgctcatccataaacctcatcatcaagcccttgcaacatatatgcccctttagacacaactttatagatttgaaacggtccttcccaatttggtgaccacttgccgaacttgttatcccgagttccaatcggcaaaatcaacttccatacaagttcaccttccgaaaaatctttaggcactactttcttgttataatgcctagcaactcgttccttatctttggtaaccttagcaagggctcgtaaacgcgattgaaccaagtcctccctctcatcggccataaggttataatactcatcggctgtcaaaccgtcttgcaactctatccttctaaagccgattctaacttcccatggcaaaacagtttcatgtccataaacaagcttataaggaggaacttgaattgatccatgacaagccatccgataagaccataatgcttcggccaaccggaaatgccattgccgaggataatcagaaatcttccgcttaattaatttgatcaagctcttgttagatgcctcagcctgcccattagcttgtgcataatatggtgaagaattcaacaatttgatacccacgctatcggcaaactgaacaaactcatcggacttgaagattgaaccttgatcagttgtaatagtttgaggaataccaaatcggtagattatatgttcttgaacaaattgaattgcatccccagaatcaactttattcaaaggaatggcctccacccacttggtaaaataatcagtcgccaccaatataaacttatgccctttacttgatggtgggtttatcataccgatcatatcaattccccaacctctaaatggccacggtttaataataggattcatagccgacgccggcgctcgttgaattgccccaaacttctgacaatcttgacaccccttataatatctgaagcaatcctccagcattgtcggccaaaaataccctgcacgccgaagtagccacttcatcttatgggccgattggtgagtgccacaaattccttcatgaacttcgccaattgcaactttagcctgattgccactcaagcacttaagtaacactccatcaatcgtccgataataaagctcatcatccaatagagtgtacttcaacgccttatatcttaatttcctagaagccgattgagatggattatgtaaatattgatgcacatcatacctccaatcatcggctgttattgctgcaatttcaaccttaacatctttgatcatcggcttataccccgataccccctgggccaaatcattagctttaatattttgttctcgagatacatgctttaaagtaatcagccgaaattccttcatcaattcttggcatttctcattataaactattaacgtatcattcttgcattcatactcccctgccaactgactgattaccagcaaagaatccctcatgatttcaatagcatcggcttcaacttccttgagcaattgcaaccctttaagcattgcttcatacttagcttgattattagtcgcataaggtttaatagtataagcaaactcgaaacatgcccccctaggggaaattataactaggccgataccacaaccatgagtacacaccgatccatcaaagaataaagtccatggcaccatttcaaccgagccgattgaatcatcacgatgttccacaataaaatcggccacagcttgtcccttaatcgccttcagagactcataccgaagatctaactcagttaaagaaaatatccactttccaacccttcctttcaatattggagccgataacatgtatctaacaacgtcggccttgcatataatagtacattcattggacagtaaataatgccttaacctcgtgcatgaaaaatataaacataagcataacttcttcacaggagaatatctagtctctacatccaagagccgacgactgagataaaatacaactcgttcttttccatccaactcttgaatcaggaccgagccgattgacttctcaccggccgacatatacaatctaaaaggtatcccttgttgtagaggaatcaaaacaggaggggaactcaggtatcctttaatattatccaaagccttttgctgctctgtcccccaagtaaactgctgatcagccttcaatctcaacaatggtgtaaaaggttctaattttccggacaaattagaaataaaccttcgaacaaaattaatcttgccgatcatctcctgcaattcggtcttgtttttcgggggcttaatctttttgatcgcatttatacttctcagagttatctcaattcccctctcatggacaagaaatcccaagaactggccagccgatacaccaaaagcacactttgtcggattcatcttcaagccatatttcctggtcctctcgaaaacttttcttaaatcggctatgtggtcttttatttccttagatttaacaatcacatcatcaatatagacctcaaccagccagccgattagatcatgataaatataattcttggcctgttgatatgtagctccagcactcttcaagccgaaagtcataacaacccattcaaataagccgattgcaccaggacatctaaaagctgtcttatggatatcttcttcagctataaaaatttgattataccctgcgtttccatccataaaactcaaaattttgttccctgacgcagcatcaaccagctgatcggctactggaattggatattcatctttcggtgtagctttattcagatctctaaaattaatgcatacccttaccttgccgttcttcttgatgacaagaactatgctagaaacccactcagcatatcggcaaggacgaataaaaccagcatcatataaacgtttaatctcagctttgacaggttcaagcatatcggctttgcatctcctcggaggctgctggtgcggcctaacccctggcttgataggtagccgatgttctacaattgatcggctgagtctaggcatctcataatactcccaagcgaagcaatctctaaactcttttaagagctctatcagcttggttctaaattctggagacaaaatcttactaataaatgtcggccttggccgatcgcttggacctatatctatttcttccaaatcatcggccgacataaagccttgaccttgcttgtcatcgagatcatctaccgcatccgtagtgtagacatctgaaccctccacgacgccctgaaaataatagcttgggttctccatcttcaactggctatatatcagaatcggacacttttagaaaatctccattccaaacttttccagataaacaatcaaggccatccatctcccaaagagctaaattggcactggcaacattaactgacctatcggctggtacgatctctatcttgtcaccttgccactgaatcaagcattgatgcatagttgaaggaatacaacaattggcgtgaatccaatcccttccaagcaacaagctgtaagaacccttcccatcgatgacaaaaaacgtggtaggaatagtcttactgccgactgtcagctccacatttagaacacctttggtttccgatggattgccaccaaagtccttaagcaccatatttgtcttgatgagattctcggcatttctacccaactttctgaacgtagcataaggcatcaaattcaccgcggccccaccatcaaccatcattttaaacaccggcttcccattgacatagccatttatatacaatggtttaagatgccgattctctgtcccctcaggcttctcgaacaccgcctgttctggtgatagaaccaacttagccgattcctcttccacctcgtcgacatcggcttgatcgatcccgaattcggctggcaaggtaaaaaccatgttaactggtgccgtcgcaacactctttccttttgccaacctctttgcctcatcaactgcaacatcgtcggctacaggagcctgattcttaacacgccactcctgcctcggttttgctttcttcagccgatgattaatttcttgctcgacctcctggaagcgttccctactcctcaatctttgaacccttcttttctgattcttcgtaaaaataccaggaggacaccattgagtcttcttattttcatcatactctgaatcaccacgatggtttactgggcccaatctctaatgaacaggcactcttgtctgtttcggccaattgcctccatcatacaatcggcttgaaccccttgcaacatcactgcatccaggataatcctcgatagacggtaacctcataccttcattccaacagaacctgaagaactcacagccccaatgaggatcaaagccaccattatcttcttcatgatgcctttcctattgcttgtcatattttctttgatatttgtttataattctagccgaacttacttgataacccctcatgcgccccgtattagctgttcggccagctgtgtgtaccatgttaacgggaaatgggttaccatcgaccctcatcgactttttggaatcatcaaacttaatcttgcctctctcaatggccatttgaatctgttgtctaaacaccttacaatcgttagtagaatgggacccagaattatgccatttgtaatatctctttttgcctaattcctcagccgacggaatcatatgaccagcaaggagttgaatttgcttctctcggagtagcagatcaaaaatcttgtcagctttagtaatatcaaaatcatacttctcttcctttccagaactctttacccattggcacggtatgacctttttactcctcacccattcggctgcagctatctcagagtcatcctcatcgtcatccgacccatacatgtaaggacaaacatgattaaccttcttagagcttttcctagcatccgcagacctatgttcgtgcaaggttaccttttgtatcagatgtgacaagctatcaaagtcttcagacgagaaattctccctaatcagagcaaccataccctgaaaggccagatcagctaactgagcgtcagttaaactcaagctgaagcacttgttcctcatctccctgaatctctgaatatactcgtgcacaggttcatcatgccgctgcttaatcgccgtcaagtcagataacttcatctcatgaaccccactgtagaaatagctgtggaattgcttctccaaatcggcccaactattgatcaacccatacggcaaagaagaaaaccaagtaaaagctgatccagacaaagataaccggaacaacctaaccctcagagcgtccacagccgatgcttcaccacactgagctaaaaatcggctaatgtgctcataagttgacacaccatcttgtcccgaaaatttggagaagtccggaactttgaaccgattgggaagaggaactctctcaaaccactcagggtaaggctgccgatacaagcttctagtctcttttggtttaagcccaaattgttctctcatcacatcagcaatcacatcgacccacggtcgttgctgagctgctccctgtgactattgttgcatgggctcgaactgaccgtactgagacgcaaactaaggttgagccagtccccctggctgatattgggcttgcggagaaggaggctgatattgacaattcaagttgcccccctggtaattacgaaggttcggctgaatattacatgccaaatgctcgggaacaacttaaggcattattgtgccatccggctgtacgtggtgaaccaagtgttctgggacgacttgatttaaaaatcgttgtacaggctgtccaccaggcgtcacaaacccggccgatgcgctcattgagccttggtgttgaatcggctgaatgatttgctgtcttaacgacgtttgctgaatcggccgcggaggctattgccttggtggcgtttgctggactggttacacaacttgttgctggattggttgtatgacccgctgaatcgggagtatctgttgaatcggctgctgctgtattggatcaacagtaggttgaggcggcagaaacatggcagcaacctgatcttgcgtcggccgattcacaacctgcccactatgctgtggctgctctctcattaacaactgagggttcaccagctggcctggtgccaatgctgacgaagcaggtaagggagttaatgccagcgccatcggctgagctgattgtgcgacggggaaagctgcctgagtagatggctgggcatcagtgatcaaaggccgataatttggaaagacacctccttgcaaataaactgggcctgcagcctgatgctcagctattgatccatcggctattgacttcatcatgtttgataaggtattgactaacaccccagactgattgatcaaagcatggtgcacagcatagtcgacccggtcttggaaattattgaaaaaatcttgtgccgcaccactattctgattaagatttcccccttgcaacccttgagcaccatcaccttgaactccatgcactccatcgccttgaactccatggaccccttgagagttgtcaccctgacttcctagagaaccgtcagtagcacctttgtcactcagttgagccgagccatctagagctcgtttcccgtcgtcacctttggaagaactggtcctaggatcatcggcaactacctttactttatacttctgaatcaatgttcccttgcgggtctgcatgaatgtcacaccccgaagttctcctcccaagcctaaatttaatttataaatgaccctaagaaaataccggtgcaaagcaagagtaaacccttgtaaatcaatgcaaataataattggaattggcatgtggaatttttcttgagttcgacatgtcgaaattcactaacaggatttttagaggaattttcagagccctagaaataattttaaccaattaaaattgagcaagcaatattttaattccagggaaaattcttttctcttttttctttttctttttccctccctttttcggatgggccgccggcccattctctccttttctctccctcctccctgctgggccggccgcaggccgaggcccagccaagccgcccctccctctctccccgggacgccgacaggtgggccccacttgtcggacccgtccccttcctccagccggcgccgccgcgcccgcaaccgccgccgcgcccacgtctccacctccttcgggccacgtcgaccacgcccgcgcgtgcgccgcgttccccgcgcccactcccctctctctcccgctcgcgcccgcgcccgagatggccgggattcgattttcgaatcccgcctctctttccttccccactccccacgttggccggcgaaatcccgcctctcccggccacgtccggccctcccctcccctatttaagcttctccgtcgctccctctcgctttttccccatctcgccgaactctcccgagcctcccatcgctcccgcgccgtgcaacctcttgccgctgccgtctccgctactccggccgctgctagccgccactggggtctccgccgcaccgcgccgtcgccgccgtcgggttcgcgtggccgagatccaccccgtccacccctccttcgtcgaggttcgccgccggagcgccattcccatcgtgcgacggtgagggtcgccatgtccgccgctttcggccggcattcccgtctcctatggcccctctcttcctctctaatctctttcttttcgttctttaggtcgtcccggtcgccgtccgccgcgtgtcgacctcccttcgtcactcctcgtcgccggacgccgccgtcccctccggtgaggactccctcccctttccttttcttccccaattccccgtgcgtcgccgccgcccgcgctcgccgtcgccttcggtcgttgccgccgtccgctgccgccgctttcgcgtcgcttttgcgccgtcgcctccgccgccggatgccgtcgccggcaacgcgacgcgcgcgtgccgccgccgctagccctggccggccggtcggctttgatgccgagccgagcccggcggccgcctctatcgccgcccgtccgatcggccccgagggcgatctgggccgtcggttccgtggaccggcggtggaccacccgcgtggtcccggtccacggtgaaccgctctcccctgagccgctgaccagtgggccccgcttgccggcgccgcaccccctccgtgctgacgtcagccctggaaaatattgcgcaataaaatatttaaggatttttgttatagtaataaacacagtgaatcttctaaaattcataactaattcatccgagttccgtttaagcccattcaagtctcagtaaatcaagaaaaatgtgtagaatccattaaaaatggttttgttccctgtttcaatagtcttatagcctgtttgcaatgtttgccttgtatgtcgctagattccggttcctccgacgctccggtgtacttcgaaatagtcgccgaggttcctccagcagcagagcaaggcaagtcatgcttgtcacttgaacatgttgatcctatattgcaaatgctctattgttttccttcaaatactgcatcgttttataatattactatgggatgtttacctattatcatagccatgctattgttgtaccatgtccctttgtcagcttggggtcataacatgactagagattgggctagggattgcttagccatgcttagttcaactagttcacaatggggaaaatcctattaatgtttagactgttggttctaatggttttgttggattagtgccaccgctttggtgttggttaattaaaataaatcacatggtgggctgtgggtgcatggttttgctggtcgcacccatggcagttaaggaccggttcgcgggatgccctggaagaacctatcgtacttaccacaagccagcgtgggcaacggctgggcttgtagtgtagctttcctctagccgacgcatccaggcaagggtgggcgtgatggagtttggatgggccctgcgacggcctatgcggcttccggattcacctaggcacgagaggggactgcccgctgccttgcgaggagtgggggtgaaacctgaggtgtggtgtgcttggttagagggggttatgcgaagggtcctgtcacggcctctttccggtttgtcgtggtggcatgtcggcgcacggaaacgtgtcgtggggctgtgtcttgtgggtacagttgtacacctctgatcagagtaaaactattcgaatagccgtgcccgcggttatgggcggtcaaccagattcaccgtgattagtctcaccctagtgtaatcttttgaatttggatagtttaggtggatggttgggcctgtcgcaacgtgggatagcgttggacagtggatagttaatattaattaattattacaactgtttaaatctttcaacttctgtttataaatgctcgctttatgcaaatgaaccactctagctcttctttgataattccctgcatcatacccctattccggtatgacttgctgagtacagtgggtagtactcagtcttgctctatttttcccaaccccagagttcgagtatgtgtcagatgaaggtttctccgaggagtaggcttcgtccgtgccgtcgaggatgcctgtggagtggtgttcccgctgcagttctagtcaaggcttagctcctgttgtctttcttttcttccgctgcatttgtgtaagacttttatgatgtttgtaagacgtggatctgaatgtcaacattgtcgtttgtgtaccccggctggtcctggacggggattttaatgcacattctgcttggaattctattcgggaatttttgggcgtgacaatgaatgagttcaagaactggtcccgggcttgctgcaacattgcttcaaaatccttcttctgctcaggtataaatttctccggatcgatgggcacgacgtttccttcattgacgtcagtcaaccccaacttctggatcttttctttaatagtgcttgggctagccgaggatggcgacagcggtggcttctcggccatgaggaagaattgcttgctgacttctaatcggtcccaccgggcgtgccaaaagcgtgttgatagaaaacacgaggcctgggagatctgcttaactccagtgcaggtccaaagctcgcctttgaatgtatgagcgtgccagttgatttgatcctgtaatcaacaagaagtagagacaaagaattcgtggttaaatctataaatgatagtcgatcggctaggtgccgatgacatatcatttatctttgagccgatgtcctatatgaatcgatcagcggttataaatagatagtaaggaactaaatctattcgatcggctatagatactaacgatatatagttcttatattaatatatacttaaatcaagtgattgggatagatcggtcaccataccgagacattataaatcacttagatcgaaatatatattaataacaggattatatatgtttatagcatagccgatcagatagatctagcgtgtatcggctaatactccgatactactctatatcaagatattaaaacaggtatgatgtattaaacagaagcttaatatatttagattgcaacgatatcttgacacaaagggcagatttaacatgtcattgaagcatatagatcgaatatggttaaatcagataagatcggctgaaattccgatactgccctaattggcaaccagagtacaggctagagattgatattctaaccacgacttaatagatcaaactcaactgatgcagcattaagtatgaaaagaagaacaatatctagacaatcaagccgctggatgtttcataaagtggtagatatcttatataatctaagacaacgtcgctatttaacctaatcgcctgccttctatcaacagatgttagccgattgtaggttagatgacgatattgccaaagattatgtaagatatatgataacttgatgaattatatagacaagattagagtgtcataaggatggaagcactaatcccgagaacacaagccgtcataacaagttttacctcttgttgaagatcgaaaccgatgcagctcaacccgaaagcaagaactcgtcgaaataaaactaaagcaaaaaggtggcgatgcgccgagattgtattgaacgtgtgtgttaaaaattacacagggctcggggtctatttatccccaagaattacaagagtccataccggacacgaccactatctctaacaaactctaagataccataagtctttgcggcagacttttgtctaaacatatctctaaggaagttacataaaacatcctaattaatagatgcaattgccttctcaggactctatccatgtgcggcaatcatcttgaagcacctcaattcaacccaatgtcatacaccaaattatactgttagaatcggctgcatcggctcacctagtccgactcagacccagccgatcctaatcgtagccaatctgtacttcagccgattcttgctctgttctcggatcaatctccgcctttgactccaccttgatctaatctccttttccgatgctgatattaccaaatttggtcgttaacagtttaatacttcaaatttggccaaagaactaaacacggccattatagcactgttagagaaaaaaaaattcttttgtgggaattaattaagcttgataaattcgtctcgcggtttacaggcggaatctgtaatttgttttgttattaatctacgcttaatactttaaatgtgtatccatatacttcagaaaattttgaccaaagaactaaacacggccattatagcactgtcagggggaaaaattatttgtggtagtgccgcacaacgcttatcgtgcaaaactgctcgaactgacgacgcgtgtcccgtctcctgctacagtccgagccgtttctaggagacggaatatgcgttgtcagtttgagcaatgttggttgagaagtgttgtgcgacactgccgcagagtatttttttttcccactgtcaggggatgatttttcgaagagaaaaaaaaagagtaaatttcacattaggccacaaattttgaccaagattttataataggctagggttaaatcaatgttttcacttaacaccatacatctttacataagttttcagtttggactaggggtgagcaaagcatgggaatgtgagaaaacttcatatgatttacacatggataattataaaaggcaaaacattttatgttttcttccttctttttagtgtgagtggtaattaactattttttattttatttttattcatttgcccctatgtatagatcattttgtgccacttttaaacatattggcatcattattttagtgtgacgtgctgaaaaaagttgttttgtgatttgctatttctttctaaagttatttatcttaataccatggaactaaaatgattatttgaactagcttttctctgacaacttctattaatgtgctcaaccctagtccaaagtgccaactagtgcaaagatatgtggtgttaagtgaaaatattggtttggcccttacccattgcgaaactttggtcaaaatatatggtgcaatgtgaaatttactaaaaaaaaaaacgtcaatagaggagatatatatatatatatatatatatatatatatatatatatatatatatatatatatatatatatatatatatatgtatgtatgcagcagttgcatatgaatctgcaggtgacttttcttgaccggggaaagctgagtctccgttcggaagtggacaccggagaataatctcatggtcaattggtaaaaggaaggcatatacatatacatggaagtcccttttcgtctagtgatcacaacacggttagaaaatggcgaatggtcattctccttctccttttggatcagaatttctaatattcgaaaacacgcaaggagcatatatacaatgacatgattatttaatcacgaacgattcaaacgtgactagttcatgaccttttctttttcttgatttgatgtcatcagggcggcgacgcagcgtacgtacgtgagtggagcgcatgcagtaagcaaatgatggttacctgtgggtttaatttatcctctctttccatgacttgattccactgatagcgagtactccctctgtccctaaaaaccttatcttcaattttgtcccaaaaaaatcaacttataccactctatctactgttaacacataaaacaagaagttttatcccttaaatatcatttacctatctatcactattactatttttccaataattaggggtattttggttatttttactctccactagtttcttcttaggccatcatcaatgcggtgcttcagcccgtgtccctacagacggccgtccgcttttccgtcggcgtcgtccccctgcgatggaacgcgtccctctactgggggacacggctctctccgcgccttgccaaattttcacggggagacgcagcctggcgccgtgttgtgcgcgtgtggagctcgtgagcatggcatcgtcccccccaaatttcctctttcaccctcacctcactctcgctctctcctcagtctcatcgcgccgcacccgacaccgccggcgccactcccaccaccgccgggaccgccaccgtcgacgcattgctgatggccttagagagaaagagaagagagaggcgacggcgacgaccggatccggccaccgcacgccgcggcagccgttggccaccagccagcgacgagcggaaacggcttgaggctcccgtgctcgccgcctcgcacgccttgcccggcctcctccgccggcgctttgcccgccaccgccggcgccgcgggggggcccagatccacccactacgcgctagatctggcgcccccgaccagccacggcgcgaggcggaggatgccggggaggatgacgacaggagagagggagagagaggggcggtggtggacgccggcaacgggagaggcggccctcctcgtcgtcctcgccaccgctccctgggttcgacgaggccaccacggccgaggaccgcgccatcactgagcacgccttgcgtctccggcgagcggcagcgcgctggatttggtgcggcactgcgtggaatcggatggggggcgtaggatttggcgatggcgagcggcgagagggagagagggagagagaggcgagcggcggaggggaggagacgagcatgcgtggagacggaggggaggagacgcgccggtaaatgagaagagagagaggggggagaagagagaggtagtataataaaatacctacctgagctttttgggctaggggcactcgttaggctattaggggtatcctccattgtgagggggttctcagagggtaccctcagttagtgagggtactatttagagtgtccctgattgtagatgtccttaaaattataggaattgatattttgtgggactgagagagtatacaatagcgcaataatatgaaatgcacttttcgtggactggaatacttgatccagccttcagacaacgttctaaaaaaaggccttcagacaagaagatcgctttggtttgactggaggatctgctataatccagtcaggtttacacttgtccataaatagtgtactcttcaacccaaaaagcatttcctaatattccaaaatcgatctcaaacggaagctgacaagtgacaatatgtgtacatatctcagaaccagaccatgctgcaaattgttgcggagcgatcagaaagccttgtgctcgctaactcacagatcacatacctttaccggtatgaactagtagtagcgttgtagcagatcacgccatgcaggatgcagcacacgtatatattcagagctcaagagttcagagagtcgataaccatgtgtcaatagggttatgggccaaaatgaaaacccatcctactacttttctcaagaagaaaagagaacccaattccgaatcccaaaatcagtcgcaggtcacaaccaatgctacctccacgcggagcaacgcgtgagtggaccacgtaacgttgtcacgtccacgcgcctccgaagtccgaacgtttcagcacaagaaacaccaaatgataggctcattgggccgcgaagcaaacaccgatcgagacgctcagctaagatgaacgagccagaccaatcaggcagtggacatttctaggtacagctagaagaagtgtacgaaatatatttaggcgatgcagtagtacgtagttatcatgtacctgcacccccggcgtttctctgcttgtttttgtgcaagtggaccggtggttctctgtatatggagtacatgttgacgatccgacaggttgacccatccccaagcctacgacggcattgcacacgaatgccaacccccgggattgacccggacgtccgaacgaccggacaaaccaacccgtcctacggctgcgcccatcggcgccgctcatgtcgtcaaaccacacgtttcgccacacaatatcgcaagcgcaggattttttttattttctaattttaaaaatatagcatgaccaaataacgttaccacgctagccaccggcgtgacattgtttttgctacgccagtccgattgacgtggccgatcttggaaataagttttaaaatagtttattttaaaattttaaaagttcaaaaaataggtaaaattgcaagcataacgtggccatgccgagattagctagaccgacgtgatagtgtagttttgccacgccaatccagttggcatgaccacaatgttcaaaaaaagttcaaaaaaaaaaaacaagcgcagcgcagccacgccgagattagcccgtggccgccagtgtgcggctgggccagtttgctcgtaaaatgggccgcagcccattttccaggccctcgcagcgaacggcccagcgggaagcctggggattccggctcgcgcgtgtcctctcctccgcctcgcctctctctctctctctctctctctctctctccacggcggcggcggcggcggcggcggtgggcaacggcgtccttccaaacgcgggaagccatgggctggccacgggcatggttgctcgctcgcggcttccgtgggtttcgtagccgacggccattggaggtaactgtgaggtgaggattttcccccggcctccactatcatagcatcgttcgtttgcgcgtaatctaagtctgggggtagcgaagatgctttgattctgtggccgcgagacgagacacacgggggaatctaggatgggggagggaatggaagtcggcatttcgtacgatttggccgctgaaaacgagatcaccgggccaatgatacgaccctacgtgccaacctgctgtctacacaaaattggaccaattgttccctgcaagaagaaggaaacatcagagccccgagatcagctagatcttattctagttaatctatctatacttcgtcgcctcctcctctcacagtggctttatcgcatcttatgattcttatccaggcaatcaggcatcattctttagctcctatgccacagatcaattatcaggtaccttttccagtttcctgctgggttccctacttttcatcaagtgcacatctatgttgggaatccaatctttgatgtgctatattagtatatggtgtggatcctgttcttatgatgtcaccgtcacataattacatgcttacttgcagaggtaaatacatgattaatcagaaaaatatcagaagtttttctttgggagtgctaggagtttggttcatttgatcataaattttcttagcttgtttcatctttcatattatttttctcaatgcaccacatatcatgacaggctgatattgttagtcaacgtgatcaggaaatccaatacccttggctggtaagtttgagttataaatattcaaataaatatttgagtccttttgttttcaagtaccaaatccatagaatagattattgccaagagagcaccctggtacttgactgtagagatttgtatcccatgtaatacaagaatcttggccacttgcatggtgggggttcttccccatcgtccacaccttaggatgttgacgatttgaattatcacgtgggagattcgcatatgtgcaggtgacttttgtttttgctgatgcgactgatgtaaaggagccagtaagtattttgtaatccacactttcaggcataacctatttctaaactctcatcatcataactggatgacctgttcctctctcttattaaaaacttgcagtttgtggcctagtcaactatttgatgttggccaaaatgtagacgtggcaggactttcattttaattggaagtcctgaggactaagatgaaagaacaaaaatctgaagtaaatgctaagaatttacaatgttaaaaaaaaaactgaactaccaaatcgcattttggcaggaacaaaccatttagaaatgttcagcgaattcattttgtatagcttttgaagttctcttgaacaattagtcctttgagaaaagaaagttatggaatgatgccattggaatgttcaccaagaaagagaaataaaacatgattttctacatggaatggaccattgttataataagtggtaatttcaccatcctacagggttaccagaaaagaaattccttagactgtttggatcatgcttggatcagatctgtcattttctttttatagaaaatctggaggttcatagtaccctgaactatctaccaatcactgtgctacggaaatcaaacatgtaagtatgtatcctctcgcataacatgcagttatcccatgaatctagttatggcacttcattgtacactagatcctatttacatattttttactagaataaacctatattgctcccaccagcaaggttagtgacattttgggatgactgcaattacattgaaaaaaaaggtttatgtaagtttttcttgaaaaatgtgttcatgatatatttatattccgtaaacatgttacagtagaaattaatggccaaacccaaacttacatgtcaatttccaaaatgtcaattatctgtgactggacatcaaagtgacttaatgtttgaatgaaatagctattttcaatatagtttctgtctatgaacattttgactgaatatctccagtatgtcgtcattatgcgcaaaggggttgaattctaggtgttgatatggattgtttttatctgttttgtttgactacatatcacagttgaataatatatctggtttgcatgtcattcttttctagcaccatgacagattagtttagttgaaatatgaaggggtagataagtacttctatcctttctggcgcaataaaagcttattttcctcaattagaggaagtccaaataggcatatatttaatgtgtgtccgttcctactcattttattggcatttcctttaaataggttcagtgaagctgcagagtgaaggttatagtgaagactggcctgctatatgtgcattgcacaagacaatctgcagtctttttgtcctcttgatttgaatataaaggttctaattctactaaaaatgaatataatacaagcattcaataaactgtttaggacttgcacatgtctcatcatttagattgtgataaaataaaaaaaaatatttgaacatttctgtttgagaggggaggatgttaatacaaatttctagtcttctgtttttacctggaaggcttcatagccacagcttctattccaaaaactatttgcttgtcgtaatcactgaattgatacacatttcatggtttctacagccattcagttgacttgaatcagtaccagaaatcacctttacttgaaacattctacaagttgttagtgccaataccttcacatagtgataacatattacctagcatatgttaaccatcaaatgcacccttaacacattgtcccaaacagggatcaaaggataaatgatctctctaaatagttctttttttcttcatatgtgtgttagggttggggtgtggcagagggggtattagaaggccaaacctctgtggtacacgtctatagattccaaataaatgatacagtacctctttggtactcccatcaacatggttcacaccacaccactacaccagtgacaccaccaccaccattacagggtatttttcttggcccctctgtataaatagcagcaccatgttcactctttgttccattgaaatacaagcaaccataaacagtagccatttctaggaccttggcctttcttgaaggaggatgagttcatcctggacaacaaagcagaataaggtgtttgagagggcgctggcaatatatgacagggatacgccagatcgctggcagaatgtggcacgggcagttggtggtggaaagtcagttgatgatgtgaagaggcactatgaaaagctgatcaaggacgtggatcgcattgactctacaggaggccatcaaggatcccattacaacagctccaatgctagcagcagcagcagcagcagcagcagcaactctcggggcagtgccaatgaggaccagaggtaatttggtggctcatcactctcttcatgatcgttccatatatgcaccatcattaccctgtacatcctcttcttatgaagttatttacacaggccatgactcatgagtatatgtttacttgagctagaggcttttgttcattttattgtttctagcttactatattctgctgtccaccttgattatcttttcccttctaatctgcaacatgtttttattgcttgttctgctttgttccgttagctagcatttctagttattttgcttgtgtatgtggacacaacctttggttatccttaccatgtgatttccacaaagtaaggctaacaattgttcttaggatttagctggaggcgacttgtttctcaagtcgtgccattagtttgttaattagacattcttatgaaaacttgaaattttactagctcttcaaagtgcctttttttttggccttatctaaactacaattgccgtatctctttattacaattactggtaacaagttgtgctattttcttcctgttttttgctctatgtttgttgggactttatttcaatgagaaaagacattatttccttttgccatcccttgtctaattgtcaattacatgctttgtttggcaacatgcaaatttaactagatggaaatattctgtacgggaaactgcaggcaatatgcaaattcaacatcatctgcccatctgatctaatttggtttcgattctaaattctttaatctggggaaagatatggagataatctagtagtcctagctagttcctagctattaaacataactcggccattcaattatttgttgaagagatgagtgtgcactctgctggaaggataagtaggccaggactcataactacatattgtaaggccctagtctcgtggcccagaaaatcgtttatgcaagtgaacaattggcattctttctatcagtatgtctgcactgcttcacacttgctttttaatttgattactctagttgtgtgcgtctgtgagaaaatagacaggcaaaggcgccaagaattgtatccatctttttggaacctgcctttggattcctctccagaaagagaaaggccccatgagaatggaacctagcacagcattaagcaaccatatgcatcttttaccgaagagttgcaggaaaagcaacatagaaccccaccatcttaaagtttttcgcctttatgacgggtataaagcgcttttaaatagtggggcttttcttgtcttgcatggaagtggtaacattttatcttcatctttccgttggagaagatgaataaatgggtttattattgcttttttaatttcttttcttgttgcaggaggaggtaccacaactttcagtgaatgtgacattgacatctcgaaagccgaaagcagcctgagttccagcaagaccgacacatatgatcgactgtccctgcagatgctaccttcactatttcgtttatgttttctattatgcgcgtgtgtgaatcagaactggccctaatagaccagtagttagtaacttagtttcaattgagctatgactggtttgctgaattatactgttgtattccatctgacgatgctgtatatgtaatatctgatggaaagtttataatcttctctgagatctaaagttcacatgttcttactatatatctatcttcatgttgtcttactttgcgaactcccattgtgtcattgtgattgtgtaccaacttgtcaactattccctccgtttcaggttataagacattttgactttggtcaaagttaaactgtttcaagtttaactaagtttatagaaaaatatagtaatatttataatactaaattagttttatcaaatcaataattgaatatattttcataataaatttgtcttgggttgaaaatgttactacttttttctacaaacttagttaaattaaagcagtttgactttgactaaagttaaaaacgtcttgtaacctgaaacggagggattattaatctattatgttgttgagtcgtaaagatgatgctgcggggttgcacgataccgcgacagtgcgacaggatttggacgctaacgaaagttcagggcttttggatgcaatgtaccgaatccatgtctaagtactcatcaatagtcataagataaggaaaaaatagccatcttggataggcgagggccatgatccagctctgtcggcagcgtggtccctaagcaaagctagagcagcagtctacttgtgatcgtggaagatatgataagatcgatcagtcctgagtaatactagcatccatggacaaaaaaacaactcgatgatcacaggcgtcagatgcaccatgcaagtgtacgtagcaactagcaagcaatgagttgtatgcttgtataacaagaacactctaagcaagtataacaactgggtgtagggtaagttagttacaccatgtaacaagaggacgcaaggcaagctaagcttgtataattgcacgacggttgccatgtcattgtcgattcaggttaaaatgtacaatggaaatcgacaccaggttggtcggctaagacccgcttaaggaatctgcattgtgatttcgtagaccatatatccacatgcacagtctttggcgggtattattaggtctccgcaacctagatgtagcctgtaggctgtagtaccgctatacctcgtttttattttttattttttaagataataatggaatagaaatccattctagcctttgctcaaatgagttacaactaattattacacgaaatcactcaaaacgagtgcaacttaaagagaacttaaaaaaactcttccaaacataaagcgaacacaaactcataaatgccaacacaagataaagagcgcacaattattgaattttatttgtgaatctccatccgaagttgacaaaaggatgcataactgtcgtctcaagattacgacatgcagacttcaaaagcttatagtcttcatcatacttttatagttgtgctcaggaccaaagctaatatgttgtcctgaaaagaatctgcatataggacatagatggtgatttctcaaaaataatatcattcctactcaaccctatagctcaacatatagtagatgctcctataaaaataagtttactggtttttttatcaacccccacaagccaattttcaaatatatgagatataaaccaaatgaaacctgaacagctctccaaagaaattttgcaaaatgacactctatgaaaagatgttgaatagtctcatttttcataaaaaataatatctcaaactaccattccaatttctcttggctaagggcctgttcactttgatgctaaaaaaaatcttaccaaattttagtaaagttgccaaaaaagtggctacatttagtttgctgccaaattttggtaactatataagaaatcctgccaaaattttgacaactatatcaaaatttggtaaggtttttttttgcattaaagtaaataggccctgagttgttctttgtcaacagtacccctaagcaggtatcacataaaaaatgaaaaatcgtttttcttgcatacgtttttctaagagttttttttttttttgcatagttgattgttcagcatgtacagtccttgaactctaggggcggaggatttgatcccaccattgtgaataattgtagcttaagtaaatttgagataagttatttttaggggaaaattgagataagttagcacggtcacctatccacccccctgaatctcagtttttttttcagactagtcacatgtcatgtactgcaagttgcaacggggatgagaaacaagatggtccgcacagaatgtggttcaattttttttcctcctggataggggaaacacggtttaattttttctctcccgtctttttcccttttcttcaaactatttgtttttctccccaaatatgaggaacatgatttaatttttttatccgtctttttcttttttcccagctcctctcatatttttctctctatatatttttagtggttttttatgggttgggaacaggaggacgactaggagaggatgggtcaactagctcagtttttctctcgcggttttcacattggttagtgaacctattagtttttgcgcgcgctgttttctttttgaggttaaaaagagagctttattagtgactatataagaggttacattcctggtttaagtctagattattgcggaagcacatagtctccacttcccacatgacctatactcattgccaattgggctaacacatgagccactctatttgtttctctttatctagatcgttgaactctcaaaatgtatttttgtacttgaacttatcttggtgtcatacaggttataatcgaaagatctatgccctaaagttgccttgtaaggggagattggaagatctataatcttaagtgtgcgatcattattttggtgatttttggaacatactatttccgtgatgagtttgatgagattatgttgagtttcggtatcaaattaaaagattgaaattagaagatggacattatagtttgatgaggagcaagtaaagacattgacaatacagggtatggcatgaagtgactatctatggcaagcacgactcggctaaaatggacctcatggaggtgaagagcaagcaagagttttggtgccgatggactgaatccggtggtgaagggcgagtgaatgctttgtcgtgatagaccatgcgaggtcatttgaaattatgagtaatcagcatccattataataagagcgtaatatgaaatgccgaatatcaagaggatgtgattcgttgatgaacatcaagccaagagccaaagtggacatttatcaaggcaaatgttaactttcccttgggaatggaagaattcatgggaattttgcaaaaggcgaaatttacataaaatttccctgtggaatggagcaattccataggaattccgcgaagagataagctaattcctatgaaatttacaaaaaaaatcccgtgttattaactaataataactgaggcgccaaagtatctcgtgttaattccctttgaaatggaggaattcacgcagtttgggcctcgttttgggccgatccaagcgaaaaatctacggtggaggcccagcccggattctattgctctcgtttggattggaacgcaagaaagaaagaagagcttcccgaaagaaaaggcgaaaatcacatctccccttctccaatctcctcctcctctccctctctcttttttagttcgccgccgaactctccaaaacccccacgaaaaccctcgcttcccaccgactccatgtggcgcctccggtcgcggacggcggcggcggcggccgtcattgccgcgtccgcggcgtcgctcgccgacgtcgcctacgcggacagcggctactccttcttccgccgcagctcccccccgcctccacctcccgccgccgccgccgccgccgctgcttcggaggactctggcacggaggtggccgtcgaggtggattccagcgggttcgaccccgagagcctggagcgggcggccaggttgctgcggaagctcaactcgtcgaaatacgcgaagcaggcaaggtgtttgttgttttgacctaatgcggggtttgcccccacctactgacgctttctgcctctcgtgtggttggtttggcctgcagctgtttgagctgatgcgcatgcaggagaagacccggcttgcggagctggaggccgagaaggttcagtacatcatccaacaacacctcagggacattgtgagtgccttttgccccttcctagatgcaaataattcaatgtggtatgccaaacatggccaaaatgtcagaagattgatttctctgcagttccagtgattgactaacagaaaagtagcagtcaatttcatctaacttgttcttgctttgagtgctgatgagtcgtcagcaccacgttatcaccgttagtctatttggtgaatcatacctttactagtgaggccataaatatcttggggcttgaagctaggatgaaagatcaattgtggttgtagtttgctgtggcatgatatttgttggttatgtcgcccttatttttctcttttttcaataatcactagaagatgacttgtgcgttgcaacgggaaaaaagtaaaaaaaatattaaatattagatgattagggtctaattttcctgataacatgttcttcgcataaagtttgttgtccagcatctccaactttaaaaattggtctagtgacaatacagggtgagataaaacattactcatgagggagtactaaagatacatatgaaaggaggctgtgctaaagtgtgattttttttatttaagagggcatgtatagcgtaattaaagatgcaaatgaagaaaaacaaagaacctgactcctaggcatagagttgcttatatgcatggttgcacaccctgttatgatcatctctgaacgctgttagtcagttttatatgtagccatgtcctcatgtagtaatgttctgccgcaataatagtaataataataataatccccagataagaattgagtttatgactactcccatagacccccaaaaaaaaaggaaaagggaaaagaaagtatcgctatgtcgatgaaattagcattaaattaaattatgtttgtgtgatgtaaaaagagaaaaagaaaagaaaaggtctttagatcaataagatattagtattgaatgaaaaaagcatgctctttgacagagctagaaaagccaattaattgcctgtatatgtggagttgcttctattctgattgacactgtatttttcccttccattatacgacgccgccagatccacgcggccgctgctcgcctcctcgcatccctcgcatgacttcaggcctgcaccttttttttttcttttatatttttcattcaccaaggcgctcaaagggtctagacaccgaataccccatatattgactattgcgtttgtgtcttttccctccttaatcaatggtcgtttttcaccaaaccatgtaccaacacgttgaggtttatttgctgacgtggcacatcccaattgcagattgggttttatctttcactcagagagataggctatgtgcaccctagttatgcagaggcttggagtgatcttagagtggctatatcaatattgatgtaattatctaagatcactaaagcttcctttataaaaagaaatagaaactgaaacagtaaacatgcaaaacattcaattctgccttggcccttttgaatggcaaagacatcctatgagatatcatggcataaaatggaaagctttagattgttagcaatctactcatgtttatcctctgatgctcgatatctggtccacaggagaggcaacagaaagaaggtgaaaaattcagagagagtttgcagcagcaagctcaagcagaggcacaaaagttacgttatgacgatgaattagctaggaaaagaatgcaggtattgactcccccctctgtttaccttctttaatggcaaatggtgctttaacagcacagcatcatttaatcaagttttttttttccagacggagcgtgaagcacaaaggcgacaggatgcagaacttgtgaagatgcaagaggcagctgcccttaggaaagaagaagttaggcgtaccacagaaaagaagattttagaaaaaatgctagaggatgagaaagaaaaggctctcttaaagaaacaaaatatccaagctaacgctgaagcaaaaggtgaagcccttactcgtgaagcaaaggctttagaagactacaacagaaagatgctcctggaacgtataaatggcgacaaagagaagtggattgctgcaataaatactactttttcacacattgaaggtgtttattttcctgctagtgacaatccttacgaatttaatcttgaattccttttggttctgctactattgctggttactcatagtaaatgtgtatgccttttttgatcagtcattattgaagttcttaggtttgtaatctccttttccctgtattctaggaattttctcaattcgacaatatcattggcattctcacatagatatttctctctgtttttagtggttatggtgtccagtaattgtgtggaaatgtcatcacgtgaaatcgcaccaccatatattcattgttcattttattattatttaagtgaaactatggtctcatgtcaaaattaataatatgtactgtgtgacacatctgttcttcattttcatgtaattgtcatgggaatgttgataaccgatactttatttttcattcaaacttattttctaatgtgaacttgtaggtgggtttaggatgctgttgactgacaggagtaaattattgatgggtgttggaggagttactgcgctcgctgctggaatttatactaccaggtttatctggatttcatgctgaatttacttttgaagtatgcatacacacaaaaccacttcacggcttgacttcatctttcccttgtcagcaaaaattgtttgagacatgtcatgttcttatttactcttttgtactttagggaaggagcaaaagttacatggggttacattaatagaatcttgggtcaaccttcactgatccgtgaatcatctatgccaaagtttccactttcaaggtttaaggctctcaaatctacttcagcatctctgtcaggaggtgcaggctttgagaatgttattcttcatccttcactgaaacggaggattgaacatcttgcacgagctacagcaaatacaaagtcgcacgatgcaccatttcgcaacatgctgttctatggtccccctggaactgggaaaacattagttgctagggagatggcacgcaaatctgtaagttttcaatagatctaattggctaatctattctgctccattcttcgagaaatatcaggcttatggatcttctataaagaaccttgttttctggattttttttaatacaaaaatatgtatccgtcaacttcagttatacaacaattgtataatcttaccattgcatcctttatgtgacagggcttggattatgccatgatgacgggaggagatgttgcacccttaggatcagaagctgttaccaaaatacatcaaatttttgactgggctaagaagtcaaggaagggcatgctgcttttcattgatgaggctgatgcgttcttgtgcgagtatgttcacaacttaatatttaagcatttgtctgaccactgattttttttttcacagatagtgatatgcatgttaatgagctaatcctgaggatattcccaattcttaagcttgacttgaactaattttgagcctgacagtacatccaatctctttgcagccactgaattcaaacaaagtaaagcaaacttcgttagaacccaaaacaacaaatctttatcataaatttattttaccatatgaccaaatttcacatctctcctttaatctcatgcttttccttgcactttactaggcgcaacagcacccacatgagcgaagctcagcggagtgctctcaatgcactactatttcgaactggagaccagtcgagggatattgtccttgtccttgcaacaaaccgacctagtgatcttgatgctgctattacggaccgcattgatgaagttattgagttccctttacctggggaggaggagaggttccagctgctcaggttatacttaaaccactatatgctcaaggaagatggaaaaaactcgttttgggactcactgctgaaaaagcaacggcagaagatacaagttaaggacataagtgatgatttgctcagggaggctgccaggaagatcaatggattctctggcagagagattgcgaagcttatggccagtgtgcaagctgctgtttatggccgccctgactgtgtgttggatccccagttgcttatggaggtagttgaatacaaagtggctgagcatcatcagcgcatcaagcttgcttctgagacttcaacttgagcaatgttatagattttatcagaaagcagcagtccttttcagatctactgtccccatatatatgttctgatatgaggaatggagtgagatatagtcagtttcctccagctgacttcgatagaagttgaaatttagaacacaccggatactgatgttcttctttgcggggggtatgacctaggcttgtccggttccaattttgttccatctctttgcctgtagcatatttatggtggtttttatggaaatacaggcaaataggtaagactgagatgcgcatgctgaaaatcttatttgactgaagtggttcaaccattcatcttatttgttagaatttgattttgtcttcattatcatagatgatgaaaagttgaacttaccgatagacctgcatgtcgtctgtgtaggatttatctaattatttgcacttatgtcttgcccctaacacaagtcttttaacctggatcgatcttatttttctggtttcttcgagctttcacggggaactcggaacggtgcacacatcaaagtttttttaaaaaaaaacaaacccgaactttcgttactcattagctgagatatcctcagcaaccaagtctgtaatacaagatgacatagaaacaggcgagtctatgggctaccctatttccttctcttggcttaacctggaaagacaaaatttgaagaaaacagatgcttcagttcccatatcacagtgttgcagtcggagagatcataatcagctgttaaaatagttttcttggcttaaacaaaatttgaagaaaacagatgcttcagttcccatatcacagtgttgcagtcgaagagatcataatcagctgttaaaatagcttgcttgaccattgttgcatcagactccaaaattagctttccaatgcccaaagatgcagctgctctgactctatgcacacaagctaaaagttcagcctggaaggagctaagcagatgattaattctccctctagcagcttgtacaacatccccatcagaatcccgaatgacataaccccatcctcatcctccaagttaaacaacggtgtatttacccaagcaagattcaactggaaattacagaaacctgaccaacataacgctctcacggcattatactccacttcatatatcaagaaaatgtttgctttatttcactcgtgaccagatgtaactgtaaagggagccaaaactgagaagagcagtaaagaaaacaacagtgccatcacagtatggttcagtggtcccagtatcaatgatagttcgtataaatgatgtagtttccgatcgaataaataagcttggtctcacgtcttttaggagtatactatcgttctgagatctctcatttggaaccatcaaagctgaactatagctaagtacacgcggtgtctgcaggtttcgagggtcatatttattagtttcatcaggttgttatattggcaatcctattgagtgctgacatgttagttaaggtaaaacattcacaggctcccatactacatcaaatttttaaagtttttaccacccttttctagagtctaaattgaatgcataaaatcctagcttaatatgccactatattatatgcatattctattaaagatgcgtctataattatgcaaaaaaaatgtagctagtcaaacttttatttttagatatttaattaagacacctgaaacatgacatttaagatactccccagtcaggagggctatgaagacagaaacatcaatatatatcatgttggtgacatgaaaacaaacggtgcgatgaaatgtcattaccaagaacacatctttctccttaccgcatcaaatgcaaagttgaatggctccaatccaagccttgtatttgccgacaagtacatatcatcattcactctgcataggctacatccaacacacacacacactcaaaacacagggctttcttcccctttgagtttctgacacaacagtccactctcacatgcacttgccttctggccaaagtccaacaccaccagagaaagagagagagagagagagagagagagagagaggaaggaagaaagagagagagaaagaaaaaaaaaacagctttggcagaaggctagaagcagctcaaacaaaattgccccccaaaaaaggctgcaaaagcccttaagaaagggggtttagcagcaagggcagtggaggtgtccccaccctgccaggacagaagaaaagcccagcacagaagcttagaagccataaacaaacactccctttaatgacccccctaattgtacttttgcacaccaaatgacaaacccccatgcctaagtacctccaaagggaccccctccactctccctctccctctcgctcaccaaaccaaagtaccaaaccccaatgcatgcagcaacaatgcacaagcacaatacacaccctctgccaaaaggaatcctacaaacccgaaaggcaaagtcaaaagcatgtggtgcccaaggccaagataggcagcagagagcattgcattgcaaatgccactgcgaattctgctactactccaacacaatactacatacaagcacagccgcgcatgcactactgctgcactaccactagcactagcaagagagagaagaaagaagccctaaaatgcacttagcatttggctctatcatgctaaacctaatcatgtttatccaagggaagcaaagcaatgcgtgcatgcatgtcctaagatcagatttaattacctctcatggcaacaatgcatctactctcctaagtaactgatgctgctgcatgagttaaacttaacaacagggagggttactgcagtcttggaagaattacacaggagaagaaaagctaaaggagagctaattaatagctaatgctaatgcatcatcctctctgcattgttctactcgctcactctctcatgcatcatgctgctgctgctgctgctgatggtgttgtggtgggtggtggtggtgatggtggtggtggtggtggtgaggagggggaggaggagaaggatcgtggtggagcggcggcggcggcggctgcgatgtcggcgacgggggcgtcttggcgaggtgtttgttgttgtgcatccacaccttgaggacgcggcgggagacgccgacctgggcgcagaacgcgtcgacggcggcggcgtcgggcttgtggatgcgccacccgacgcggtgcgcgaattcacgcatccgctccttctgctccgccgtgaacttggtccggaagcgcttcttgctcggccccggcggcgcggaggccgacgccgccaccacggcggccgcgtgcgcgtgggggtgggaagaggggagcggcggcgggcgcagctcctcgcttgacgactcggccagcgcggcgggcgcagacgccggggacacggggaggacgggcgggcgcttctgcatgtgcggcggggcgaggaggagcggcatgagccgggaggagttggcgccggtgggcgtcgcggagggggatagggacaccaggccggcggcggcggaggcggaggcggaggcggggcagagcgagagcgaggccggcgcgacgaccgccggctcgcggcggtggaagctacggtggcagccgcacgcggcgcaggccagcgccgcggcgccgtcgccaggggacgacatgaactcgccgcagccgtcgagcacgtgcgcgcccatccgcgccgcgtggttcttgaggcactccctgtacctccacgtcggcgcctcgcccgccgccccctcgccgcctctcggaccaccaccaccaccacccacgagggcaagcgtagacgccgcgtgagcaccggcgacgccgccaagaacgccatttctcgccggctcatgatggcgctggagatggtgctggctctccccaccaggcgcctccacccttcttccctgcccatggtggtgagccgcatgcaggtaggatccaccgggcgccgccgccgccgccgccgacggcgacacgagcgacaggttgggaggcaggaggggcctcgagaaagcggcggagtccatcaacgacgacggcgaggaagccgacgagccaagaacctgcgggtgcagctgctgctgcgccgccgccgtcgtgtactgatggtgaccttgctcctcctcgtcttcctcctcgtcgtcctcctcttcttcctcctcttcctcctcctccacatgcgatgatctcttgtactccatggcgtctctagctctctagggtaagagagctagcttagctagtagcctaatattaggatgattcctccttcctttgctagtttggaggaagggtttgagttggtgatggtgttgagctcttataacttacaagttgtaggtttgtgttggtagtggaatagaaagaggagtagggggtgaagggtttggtgttggcctcaaggagtcaagaagaggaggaagcaaatgaaaagaggggattatattgtttcttggttagctagataacaaaagcatggattgtggtggtggtagtagtagtatgcatggcttggttagtgatactgctactactaataacaatatggctaacaacaacaatagtattaattattatggcataaagtggggaatgtttccttgagagagagctacctagctatcttatctatctatccatccatgcatcctgaggaaagagagaaggccaggccaagccaagcaagagaagaacagaagaggagatggtgagagtgagagaccaacagaggagagaggtgacaggagagagaaagcagcacggctagattggctttggcttggcttggcttggtgtgtgttgaagcagtctaaactactccagagaatggtgaggatgatttggggtgggggagaggtggaagaagaagcccatgcccaccgacagggccatgtttcaccccctcacacacctgcactatggcctacttgccaccatctcctccaccaccaccatctcctcctcctcctcaacctccacctccctccattggcattctcactgtcactggcttgttgccgtggtttggttcccttaattgcaccacgccagcgagtttactctgcagtgacctactcccacacagcaataagtgcggcagtatatgttactactgccattgactccaagtacatcagtgtctcctccccactctcgtacaaggcctcacatctctgctgcatttaaccacccctcgtgtcatatgaactgctaactccgaatgtacaccaaaactgtgatgactaggatcgattgctcaggtacactgtgtggtgttgtaagtggccacggttcttttcttttttagcaacgtaattttaataattatccgttctatccgaaaatcaatcaacttctagagtttaaactatgtcccaaaataaaccagctcatatcttttgtcaccatcgattcacgaatcgagaaattttatccattcgataccccttatctactcattcacctatataactttcatgctaattaggggtattttggtctattgcctttttccttgacttcaccttaggaagctaggattttaagggcccctttgaatcgcaggaatggaaaaacggaggaataggaaaaacgcaggattctgacaagaatgcaggtgtaaaacagaggattggaaaatacatgaaaaacacaggaatgaccgtttgattggaccacaggaaaaacgcaggaatcggatgagagagatagactcaaaggaacttttccaagaggttggacctcttgctaactttcctctaaaatctctataggattatccattccataggaattttaaaggatagtataggattcaatcctttgtttcaaagggtttcataggaaatttttccatatgattgagggcccctttgaatcgtagggttgaaaaaacggaggaataggaaaaacacaggattttggtaggaatgcaagtgtaaaaacagaggattgcaaaacacaggaaaaatataggaatgaccgtttgattagaccacaggaaaaatgcaggaattagatgagagagatagactctgggaaagttttccaagaggttagagtggatgttaaatttcctacgtttttgctctagaattgtaggaatagaaaagtttcctacatttttccttttctcattcctacgaatcaaaggcatgaatagtgtaggatttcaattcctttgtttttcctccattttccctccaattcaaagggggcctgaaatccttcaaatttcctatacttttcctacaaatcaaaggagccctaagtttttttagggtgtgtggagtatgtgcttaatggtagaggactagaatctataatttgttttcgttagagtaatgaaatgcttgatcggttcttaaacttgaacgaggtgtcatctaaatccttaaacttatagaatgtgcatttgaatctcaccaaaggactaaagtacagacgacgtagctcaggcattgacatggccattcatgattttgagatttttttttatttagtcctctctattacagtgtgccctcaaatcgattctcaccactcctaaatcgacacctactaggctcgtcgaagaggatccaaaaagatggcaatatgagtggttgtgatagtcggttagtgaaggttctcaagtagatagatggtgccataaggataggtgatcacatgactccaacgtgaccatatcatcgccctgatcctccgacaatttgagtcccgccatctacctttcatagcaacaacagtgttgcaccgggtttgagggatcacttttttcttatccgccatctatcatggctctaggaaagctgttgttctaatcacgatctcttctacgggtgtcatgggaattggttatcgcatgttctcactgccaagatagatgatatcataggaagagggtgatcccgtaattctggtttggtgttattacgtgatcctccaacaatataagatccatcgtccgtcttcattccgacaatcatgttacaccgggctcatgggatcgccctctctcatcacaccatttattttgactctaggaaagactagaagcggaattttctctttttcgtgttctatttgtatgaaagacgaggggttttctagataaaccacgacgaggtgtcagtcggtttgaggccgtatgcgttattccgtgcaaacacgaggagctttttgcaaaaatagccaaccacgcttaacctctctgaggagccaaaaaaattcaaaaaacaaagaaaatcacaacgggtaggggtgttaatagctagtgatgtcatcctaatcaatgtctctttgcctcctctcccatgggcggggtgggagttgatttggggggcatactttagcaaagaaccctaaatgcaatgttcaagctatatcttaaaataaatcaacttctaccttatctaccctcgttttgcaaatcgaaaaaaattattcattcaatacatgttacctacttacctatgaatactagtttattattaatgacaggtattttggtctgcattaggatgttgggagctgttttttttagacaaagggagtaagagatagtaataggtaatacaagaatattcacaatgtaggcagcatgaagagatataggatgtaatcctcgttttcaattctcttcgagctatactccgaaaggtaccgtacgacacagttcgggaagtataggtatgccatttccttatcatctaatagggtgaaataatatgattttccattagtattactggaaaactgttacatatcatattattgagaagaacgcatagattatttttaaaattttgttttgggaagagaagtactccatatatactacaccctcggtcccaaaacataataacttaagactcgtggtactccttctgtcccttaatataaggaattttgacattttgcttttattgtttgacctcaaaaaatttatgcaaatataaaaaataaaaagttgtgattaaagtactttgaataataaagcaagtcacaaataaaataaaaaataattccaacattttttaaataagacgaatgatcaaacagtaccagcaaaatatcaaaatctcttatattaggggatagagggagtacaatatatttgaacaggaagtatgtccagataattacattgtactaagaaacataccattcaatcctaaatttttatattttgggacgcgtcggtactgaagaaaataaataaagaactagtactactaatccattttcgttcggcatgtaattttcgcaattaaaacagctgcatccgacgtgatgggcactactagctcttcttcacctaataaaaacctaaagccttgtttagtttcaaactttttcttcaaacttctaactttttcatcacaacaaaacttttctacacacataaactttcaagttttctatcgtatcgtttcaatttcaaccaaacttttaattaacacacgtaaacctcgctcgctgagccagttttgagtttgagccccgtccattccatggcaggaagacgttggctaggtccagtcatctagtcctccatccagtccagctaaacgttggtctcacagtgatcgagtctttggcatgatgcaccaacacataggggtaaaacggtcacctgacgctggacagctttgggaattgagaacgatgggacccttttcacaaacaccatcgtcaggccactctaattggtgtgccatggtctgccactaccattgatgccctcctctctccatcctcactcacctcttcttcacttcaccctgcagcggcaatggcgaaagggaaacgcagtgcaaaaatactcaatgcaactgtgcagtgcagagagttcttgtgccaatgcaatgcacatcaactggaacagcacgctgcagcagagaagcctttttcttttctttttttctgtttcagagatggcatagtaggagagagaggtgggggaagcgaagtctttactgctaaactggcgtcacacgttggcacacgtacgcgttgtgcacaccagctgtcttgcaacgccccgggtggctgccaaaagacgctgcgctggtgtgcgcgcgtgtagccgtgtactgacatggtgacatgctagctctaccctccactcctccagcatttgctaggggatgcaaatgcaatgtcacacacgtacggtggattcattcagcgtgcaaaaccaaaaacggctgcgaggtgctgtggatctttagtttatttgttccgccttaggctgtgtttagttcttgaaaaaagttaaaagtttggagaaaattaaaagtttacatgtgtaggaaagttttggatgtaatgtgatgtgatgaaaagttgaaagtttggagtagttaggggtaaattaaacacgaccttagtagaatttagagagtgataatttaggatgcgcacaaatccatgcttactcaccgcactccattggatcataaatatttctacctgtttaaaccaagattggatcaaaattttaaaatttagaaataattttatattaaaataaatttataaagaatgggatagtccatttcaaggaaaatctacatatattgttttctaactaaccgtttgagaaattaatgatgattgaaattttaaatatttgtttaaatattatactaactatcaaatattttaactggatgaagtaacaattttttaattactctctcctttcataaatataagatactttatcactattggtgaaaaataaggtaacaacgaaaaagtacaactgagattttatatttttggcacatttacaggtaagggtaaaaaagagaggcacattgaaggattgagtgcacaatcgaggtgatgtttgttgcgcattcttttcttgtcgggatcttaaattcctttatatttgtttatggataaatgaaagaatcaagatcactctgttatatttattgtccgagggagtaatttgtatgacgatgtgaatctatctgcaacattaattaggaatcgcgtcatacgagccacaattgttataacggaatagctaaggtggttgttgaagctactttaaaagtcttatgttccgttcaccacttgaatacgtatcggttatacattaaggattcaaatgtgcagcttcctacctagctcaatgccaaaatgctttgcttagtgatgacatacatgcgtctaaatatcgccaatatttgttagggatgcatacatctctagagttctagctactttattatattgtatatgaactagtagtacaatgatctcatgcatgagtcatgttcacttgcatgcgtatagaatcaaaattaagacaaaaaatggttgcctatgcatatatctatctccaatactgtaaaggtgcaaaataatatttttcctatatgacgacatgcacctatctttagcagtttttttttttgggttgcatcatataggaaagatgcatgtgtagaaaccatactgttctagctatagggtaattgtgaattggtatcactggtggagaaaccatctttggtcggtcgcccgaaatccacaatagtctcggttccactaaaaaccgggactaaagatgatctttagtctcggttggtggctacagcgggcatatttgatctttagtctcggttggtgttaccaaccgggactaaaaatgatctttagtcccggttctaaatctgtcaggccttgtcaggccccccgatatctttagtcccggttggtaacaccaaccgggactaaagatcctatctttagtcccagttgatattatcaaccgggagtaaagatccctgggatctttagtcccagttggtaacaccaaccgggactaaagatgatctttactcccggttgataatatcaaccgggaataaagcgtatgcaccagcccacgcacaagcgcatgcgtagcccatccttatctctttttcttctccttccttatcttcatcctctccccttcctcttctctcaccccctctcctcctcccctccccctcttcctcttgcagaggcagccgacggcggcgggatgggggatgggcgcgggctagcagcggccggccggcggtggcgggatggaggcggccgggcgcgggctggcggcagccaggtgcgggctggggctggcggcggcgggattgcggccgggcgcgggccagcgggatggaggacgggcggcggcggcccggcgtgggccggcgggatggaggccggtcgccggcagcctcgccctcccctcctccagatccggccagaggggaagcggcgggatggaggacggccggcggcggcccggcgcgggccggcgggatggaggccggtcgccggcggcctcgccctcccctcccccagatccggccggaggggaagcggcgagatgggtggccggccggcggcgggatgggaggccggccggtgagtcgattttttttgattttttttaatttgtggtttggatgttttgatctgtgaatgaatctatgaatcgatattgtgaatgaatctgtgatgttgtgaatgagtatgtgactcgatgttgtcaatgaacctttgaatcaatattgtgaatatatttgtgatgttgtgaatgaatatgtgaatggatatttgtgaatgaatttgtggtgaatctgtgaatcgtgctgtggagttgtgatgtggatttggggtttgatttgatgatatgcataccactcgattcgggagaaaataaaaaagaaaaaaggactagctgatggactgccgctaccctctctttagtcccggttgatgacaccaaccgggactaaatctttagtcccggttggtgtcatcaaccgggactaaagatcgatctttagtcccggttttttcacccgggactaaagatagcgatctttagtcccggattggtagtcccggtttgaaaaccgggactataggggggttacgaaccgggactaaaaatcacttctccaccagtgtatgtataacagttattaattggggtggttcttagttttgctaattataaatatttggtgaaacgaaagagagatgagataaaacatcgttactatgattaacaagaactcaacaacgatgcttagcctttataaaatagaaacttggttgcatgagggttggataaagaaaagaatagtaataaaaacattttttttctgaggctaatggttagaacctttgttctcttaaatgttgtatggcataatctctaaataattttgtatagatctcttttaagagctcatgcaggactctaacatagaagtgataaaaaggtggtaaggcaaacatcattgctacgattaacaacggctcattaacgatatttggtctttataaatagaaactttattacatttggtggatataaggagaaattcgtaataacaaatatttttgtggattcggttagagtttgttgttttcattggtgtaaggacatggtcctatatattgactcccatctcccatgtgaaaaggttgttgttaacgggtacgttgtctaccagtaaaagaataattagtcgtaaatatgagcacccgtgtaaaatataagatttgaatccaagtggactggttccaccataagaaacctattcaattaaggtacacttacttcgtgtcctgttattagttatatgctaattttgtagttgttgatagcgtaaaaggaattaatcatcaagagtatagcctgctactcctacttctatcttcataacccccacccccacccacccacccacccctcccaccctcaaaaaaaatccactccacaataaatagtctttcaaatataccatctcaagaccatggcaagacgaggcattatttaacacaccgtaccagtaatatttcaattatacaatggtcaaaagttaaaaaaaaaacaaaccgaaatcaagcgaaccagaagtcaattcacacgatcatgcttggctttgacccctgccacatacacccaattattggcgtcataatcgcgttatgattgaatttagcgcgacttaacacgcattaaacaaaagcgtacagtacgtactcgccgggctaacactcgcccccaaaatgtggcgcctccgcggtccacgtggcagggaaccgcacgttggaatccgtggcacagcagctgctggggatcccctgtgccgccgctgttctgcgcgtgttggtcaacacgacgcaggcgtcagccagcttgttgggggtggaccgtgcacgtacacggtacacttggaccagcaaggtaagcacacgcctcacataataaaagtagatggaaaattgaagtgtacctagtaattaattatacgagtacttacatttctattaattactaggatgattatctatttgatatggtagggatatattaaatgttcttttagcaataaacttggttgataaactacaacaaatggtctaaataatgtggcatactaaaagtttttctaagaaaacatatttttaaatacgtaaagcaaacaatctaggtaataatgcgataaagtacgtaggaacgaatctaccatataataggggataaggggactcgagcccccactaccggtgctagaaagatcggagcccccgctgaactctctctaaaattatttgctatacatatataggaaagggaggtttaagtttttatagtttattcaaccccacctgctatttctttctagatccgtcaataaaagtaggtaaaaattgttcataagtatcgttacattttacatctatttttagtcattgatgctttcaaagaagaagaacatgacactatgcgcagtgaagttacactcttagattcggtaaatattaatcttttgtttcattttaaatggcttagttccttaaaaaatatttttatagattctacgtgctttaaattatttagttagatattcataaggagtgacatatataagggttcgtcctataacctcgagtatttttatatatttatttttaacttattcatcacatgtcagttaatagagaccgaagatgtaaattatttttattattaaaaagtttcatttcaacctcataattaagcagataatgcacgtcattgcacgtacgataatatgtgcgctacagttaagttaatttcatagtcttcgcgtaggccctagcaaacctacaatatgcaccccaagtgggctgcaaattttccatataatattctgttggctgggttcaggagcgataggcacgtactttccattcattcatgccccgactaattcacacaaaagctggtaaaaagaatatagtgacatattttaataatgcaaaactaacttgttatggtaccaaaactttcgtactcatgcaccctgattagctgataattcgagaagagaggtcagaccgtattcctgagatacagagatagcactgggaagcaaggaagaagagatcatttatacattggtcctaagcttcttcttttttttttttttgagaacattggtcctaagctaggtataggttggggatgcaccctcttggtgtccatttgctcctcatttttttttaccatgtctgctagagctgatgctaaccgtaggtccaaatagtggtcataccgggaaggatggactgtgcagtgatgaactcataaatgcatggctctatcattaggatgtaaaccatgatgtacacaaattttattacatgagtgtgattaccatagaagttaagcagatcaacatttatctttggtcttcactttatacacttacagttttactcattctctattccataaaaatagcggctcgccgtttcgttaaaaaaaaaggtgacacactctcaagtgtgtggtgtgcatctacagtaagttaactgcatgtatgtttatcgtgtaattgaaaaatatactactctctctgtcccaaaatataagtatctaggatgggataagacattttctagtgctacgaatctggacagactacatgtctagattcgtagtactagaaaatatccaatccgatcctacgttcttatattttgggacggagagaatactataaaagataatagtgatggtggtggttctgtcatcagcccatcacgatttctacatgttttataaattagtcatgatatattttatgatattatgaaatagtttaatatttgtttgaatcaagtaaataatatatattcaaacaagtatgggtattttacctataataaagtatcagtattttgttagttggaaaaaagaagataatgaggccggtgaacttcaaagttatctcgttctttttcttcaattgaccaatcacatcatgtgatcaactcatcatgtaaagcgacggtgtatatctcggccagtactcatttgtcaaacatgcttctaggaaaattctctccacgtctaaatccttttccactagttatttatactcccttataaaaggcagcatgtctttgcatacggatccaaagatgaatagacgtgagagaatccgattctatacgataagcagctgaggtagccatagctcatccacgaactcacttcttcttgtagatcaaacacgttgctttagtagttggcccggctgaggcagcagaggaaaatatcacggccatctgtgcactggatgctctacccacgtacgcaaacagaatgttgatacggcggtatgtctctctctctctctctctgtgtatcgacactgttgatatcttcgtttctttgtttcggaggaatccggtggagataattcgttgtgaaatgacatatatattttgagaggaaagatatgcgtagaagaaatcatacatgtcataagcgaattgagaatatatcttaactagttggagttccagccaataatagaatctaactactcgagtttaaatcttagactcaacatgattgtttatattttttttcttagtatatgactacacatggtgtatggtttaattgtatcgataatttgagattatggtgtgtggttttatagtgaaaaaataaagaagatgaacatgatcgagactcctataaaaatgattaatacagatatcatgctatttttcacgtgcagctaaaatgtgcagccgcctatggtgaaacttggagtcgccttaggcttacgaactgtctaggaaaattaaggaatgctcatgagcaattgtcttttcgtcggtgtaaatatcttatttccgtatgttataaaccgcgaacaactgaggaaacgctggtataaatgagtgatgtattcttatacaaaactaacaaacagttttcattaaatgacacataagaaacttaaattgggatggttttgtgcatctcacatgattttcgggacgatatagaggccgccacctagctacataagttacaagtggttgactcatgtataattaacagacactgttatttttatttaagatatcattatcccaaatacaataataggagaaacttaccttgggtgaacctcatttggtcttcttattatggtaacagagtaccacatttgttaaatctgaagggatccttttggtggaaggatatatgtttgcagcctgatgaacttgtttactggcattgctagatgtaatgtgggtgatggagtttcttgttctttttggtatgatgtatggcaagatggacctcctttatcatttatgatgcctaggctcttttcctttgtcctgagtcctaattcttttgtcaagcaatcactctcagctcctttggaagacaatttctatttacctttatctcaagaagccttgcaagagttccaggtacttcaggctcagttgcaacattttaatttggagcaagaaaaggacatttggacttttatttagggaaccttgaaatatagttctcagaaattctatgccttaattttttgcactttgcaacctccccaacaatatatatggctttggaatagtaaagttacttcaaaagtgaaagtttttggttggctgctcctgatgaataggctaaatactaaatttatgcttcatcataaacattgtacacctccaaattgtgatctgtgttgtgtgctctgtccttcccaacttgtagaagatttgcagcatatgttcttccaatgccccttttcgatcagctactggaactccatgggcatttcatggaattctacattgtctttaaaaaaatatattatactccaagctacagcttcttgagtactacgtacttcatgttaaacctatgaacgcacaccctacccctccagaacactgagccggtatatttttagattgatgaagtcaccatggacgtctcgctgtcgacgggtacgatgcctataactgaaagaataattagccataaatacgagcgctcacgtcgaatctaggatttgaatccgagtgagccggttccaccacaaggaacctaaccagttcaactatcgttatatgtgtcattctggatatttatattacccatcgtttctttgaccattatcttttgtaattacatatatatcaattaaacataaattttgaaggtcctacttaattaatcttgactagtaattatctatttacccccatatgtcgtctaataatcatcttcgtctcttaacaatttggaaagcgccttttgtcgaaaagacacccttgaaaaaccattaggatcatcacagcccagtctcatgttgcatacatagcctgagtgtctcgcaccctcaccaaccaacaacctactagccagtacatcctaagtttcttcatcacattactagtacaagcagggtgaaataattgaggcaggagaggaatattaaggacaggcagcaattggcaacagggtctctcacccggcagtaaagaaggtcaccacttaaaccccctctggccatgctcatgtgttgtgcatggcacatgtagcattgcattgctgaacctattttggaaggcaagctgcgccattgcaccctctcctttgttggagtgtggtgtggtagtttagctttccccttttcaacactagacgcgcagacaagtaatgcttggctttgaagaatagctaggtatcctaggtgattagtttggaaaggaagaaagcaatgctgatctatcagcacctaaagatcttgataataaaggtaatccaagtaagcatgctctaggggtgcttgctagctgaaagcgctagttgtccatcttttatatatgttatagctacatgctatgcacttggattactgatgtcaacaatcaagcgtgtttatctcatgtcatgccgttttgtttgactaattaaaggcatacttaactatatacaagtgttttgctaacttagctaaggaaacaaaacacttaccgaatacaacacaattcgtagtttacacttacaccaatataattactctacccatcttaaaatataaggattccgtgttttgttctaagtcagactatttaaaatttgatcaaattttatacataaaagtattaatatctatcacatcaaataagtaagctataaaaattatatttcataatgatctaatgatgctcatttgatgtcataagtatatcattttattttataaatttggttaactcgagaatagtttaacttaaaacaaacataaaatctcttacattttagaatatatggtgtatttttgtaagcgtttgtttggcatgttcgagatcctgattctaggtgacaaaaacatgagagaacagagaaatgcagtctgtctgctcactgaaaagtacagtacatggctacatacacaggatacacatcttgcatgcatgtgtacacacgtactgatacgctccaattaataacggtagagtttcaaaaaaaataacaataactgtagctccagcctcccacgactgtctgtggacatggagcgtacgatacgagtacccccgtctctctctcgtacagctagagtctcacttgaattaatccgaccagcttaacccgcgcgcgagcggcccaaatatgccccggtcgcgtcgtgacgcgctctcccctgcagcctgcgcctgctgctgtgccaccgccgcgcgcgcggtcccccgcccggcctcctgcgcacccgcgacgcgacgatcccgccgaagcgtaccccgcccatgccatgacccacgagggccaatacgcggacgacgccgggctcacgcagcagcgggccagcggcctacattaatcacgtcgcgcgccgcgatcgcgtacgcgcgcacacatggggtcatcggtcttggggtaagggggtcggaaagagtttgcgtcgtgtgcgacgaggagtgcttatttggtggtaggggcgtcgtatgatgccatgaagatatgagtagtacgcctgcctcctccgccaccggccaccaccaccaccagcgcgcgcccgtggtccagccgcggcgcccgcgccccgactgtgatgaggctgtcgcgtgcgcgtcatccgtcgtgcgcgcgtttgactcgatcggcctgcggggacgggaggagcgggacggacgcgcgtacttgcttttttcgcggtacatcatcgaggacgaactgctgggtttccctccggcaccacgcggccttcggcaatgcggatcacgagacgtgtcgggccggcccccggccggccacaccacactcctccttactacgatgctccgcgcgcgcgcggcggggcgaaatgtgtgccaagtgcgcctcaccaggccgggctccgggacgcgacggggacagctagcgtacaaatggtgatgtgggtggaaaacttgccccgcgaccgggcgcgggttcggctctggctctctcgatctaggccaccaccaacaacatcggatgcccctaatccttcatggctcagcgctccatccatccaaccgggcgccgccggcctgtacgtgctgcaaaaaaccggaactctgaattttattcgacagcaacgtggtacgggatgtagtacattttttttccttatgacgtgatggcggattacaggtgttcgtatacgataaatctcacggagtttgcaaagaatccaaacgaatgactgaacgaacgagacaacacgaggcctacttacttttgtagtactagtcctactcactaccaccacatacagctaggccaaccccaacacaacaccacttggcacttgctttcaagaaacaaacatcaagaacagcagaagcaggagtattatacaacaaaaaccaccaatgtatagcccagtaacgccttggaacggatcaaagttcagttggcgccaccaccggctgcctccttctcctccgagttgacgtacgagaggaacctctggagctggcggttgtacgcgcacggccgctcgacgtgcagcagatggccggccttggggatgccgtgaaggaagcacccgtcgcccagctgcctgcacacatgcacgcacgattcgcacagatatcgtcaggtttcagactttcagtcatcatgcgccgtgttgatctctgaaaaaaaagggagaaaccggtgctgaatgagagagaagtggtgcttactctttcattttcttggcgagctctatgtcgaagatcttgtcctcctcgccccagatcagcattattttctgcagcaggagtggagcaacttgtcaaagcaggtggcccaaaatagatcattgtcagctaatcaacaactcatgggccgtccatagttgagctggttgttatgggccgtcaaacttaggttgaactcatttttgggccctaagatgtgatgatgttgtcatctatatttgcatttctgatggtctactctcacagtctcactagtcaacagttttaggttcaggcgtgccagtttcatatccgcatatctaccatgaccagtagatatcaaaggtttggtgaatagatgtttgcatttgtcagtcaactcttactagtcaattgttttagattcaggtgtgctaatttcgtatctactgctattagtgtatcacaaggttggtgaacaaaaaatgagtagatgtgggttgtttgatttaacaaaggttattttctgtacctgctggaaagtagggatcttggcatccatgttgctggttatgaggccttgaagcagctccatcctctccttcctgttgttgaacatcgcctactcatcaccaaaccaagccaaaaaaaaaaacatgttattaaccaaccaaatttaaaacatacacaaactaacacctgaacactagtccaatcatgagtactccactgtactgctccatccaggctccatccgttctaaaatacttttaaaattcaaaatttataacataatataaatattttgtacactcactttcttatctcaaccaataataacatctctagtttaatttctgcatatacttagtcatcttaatcgagtgtaaccatttctctgccaatcttaattagttcatgctaaaactcccagaaatcattatattttggaagggatggaaaaagggatgaatacaattttaagataagattttttttctatcaagcaagtaaattagaaatatggcaaatgatagcaggggcatgcttaaatttaccttgagatagtccttgtagaacctgtccgggaaccacatcttcttgtacatggagatggaaagcagctgcttgaggcccttgagcgtctccggcatgagcagctcggcggacgaggtggcgccgaggcgtgtcatggtggcgctgttcaccgcgtccgtcatggccaccaccgacccggacacggccagcgaccgcaccaggtcgggccgcgtctccgccagcttgaacgccaccatgccgccgtagctgaacccgaccacgtcgcaccgcgccacgccgagccgcgcgagcgccgccgccacgcaccgcgcctggagctccggcgaccggtcggcgctggccgtggccgacttgccgaagaagagcaggtcggggatgtagaggttgtaccgcgacacgagcacgccgaagttgaactgccacgtgacgattccctcggcggcgaagccgtggacgagcaccacgttgggcctcgactcggcggcgctcttcttcctcttcgccgccccggccttctcgccgtcgccatcgacgccgccgtgctcgacgaccggcctgatcgtgccggtcttcttgctgacatggtgcttgggcacccagatgtgcatggtggtgcccggctcgatctcgacgtccaccggccggagccccgccatcctcatcagccgcttcagcagcggcttctgcgcctccacgaagttcaccatcgtttgcctctcgctcgattgcacagcagacagcacactactgcacttttttgtcactctcacttgcacttgtgcatgcagctgctccaagacttcgagctgggcttgtattaatagaggagcaagggtcaccggaagctgaggtgcctacagctagctacaggaggtgtaacggccggcgatggagacgggcaggtggggtttgggtggcggagggccccaccggcagcgagagaggattgcgcgggagcagcaggcgggttcagcgatctaccggaataagtcgcggtagcttggattggtgcaactaaccgaccagcataccctgaccccggccggctgcacgacaaaagtccattctttcgcggtttcacacgcatcgcacgtagtacgaccatggcaaatcctcaactgggagcagaaagtacaacgaaacaatcatcttttacactgaacaatagtacaatcgatgcgtggattgatttggacagattttgcgttgggtttgaacaagtttcagcgtttcatggttgatagtacatgggaggaaattgtttaggtggtacagatttttcagaagtctcgcttgagcacgtacggcgcctgccagccgtaccagcaggcgaaggcggcgatggacacggccgcggcgacgcccaccgtggcgtgccatgcgcaggtgggcttgccaccgccgccggtggcctgggtggcgaacgcgaggcctcgcctctcgagctccgcgacgtcggccaccgcggccccgcggcggacggcggccgccacggcctcgtactcctgccggctcccgccctcgaggaacgcgccggcgacgcggccgtcgcggacccagtacgcgccgaacttgggggcggcgccgtcgccgtcgccgggcggcgcgaggtccccgaagtgcacggcttccccggcgttgtcgccgtagaactgccacgacagcgagaagaccctggagtagaagaatggcaggtagtcgatgtgccccaccgatccggtgccctccagcatcgccgcgacggcgtgccgcgcggtccggcgcgcgcagtcgacgtgctccagccggcggacgtcgccgccgaacagcttgacggggaacgcggccacgtcgcccacggcgtacaccgaggcgtcgctcgcctgcatccgtccgttcaccttgatcccgccgttctccatgaccagctggccgtcgaacagcccggtgttcgcgcgggcgccgacgccgacgacgaccatgtcggcaggaagccgcctaccgtttcccaagttcactgcagtcacctgttcaaaatcactcatacatgttcagttcaatactggtagtagcattctgaatttcaaacaaacttatatgaaacggatacaaacctttccagctgatatctgcatggaagtaaccgcagcttctttgacgaaagtaactcctcttgaagcgtaatagctctcataaaactcagcaattttcggtgtaaaaagacgacccactgcattcagaacacaaaacacacatcatttatattcatatcgagatccccacaaaaataaaatgtataccgaattcaatcagatacttactgcagtgttttttagggaagaccatggtaacttttatgttgtttgtgaccaatgccgctgcacattccattcctatgtatccaccaccgacgacaacggcatttccaccgggacatgatctcattacaccgactaatttgtctgcatcctccacattgcgcagatagcagacgttcctcgcatctgaaccgctcactccaaattcttccagcttcacggcctacgtcaacagagaaccagatcaaatttgtcaagaaatatatctattagattgagtgttccagtaaaactcaagatactggagaatccaagaatgataagttcgttcagaaatcagaactgaagatggacaggatgaaccagattttttttttatgtttttttttttgggtgcatacccgagcacccgtggcaacgataagagttttatagctgatggtttccccactggatgtaagcaatgtcttctgccgcacatcagcagaaatcaccctcgttccaagaacaagtacaatgcctagtcaagtgaaagatcatagacaggattatcagtgctgaacataaactagtgaatacgattgacttgattgctagatcaaagaagaggcaaaaatatcacatttaccgatccatctatattctcagtcggtcgctcgacttagtctgatcggtttgatagtatcaaatgatatggctcaatgtaaaatgtaaatctagacagaaacgacattctgaactaaacaatgcagcatcaaacattcagaggagcctaccgtgttcgttgtaccattcttcggtaagtaactcatccttagaaccaacgcaagtatgaaatgccggtagacgcggcgcgtctgaggataaaaggagtaaaattataaacagtttgaagcaaataaatgacaaacgacatgcagaattgcacattcaaagatcatgaaaatgtcggtaccttgtgggagcaaatagcctttgcttaatgcaggacgctcataaggagcaaactgttaatagtagagggggggaaagaaagaaaagtggaacatgattttgattaggattttgctgtacaataaattaaatcatacggagtagtatgcaaatcaggagaagaaaacgtacgtgctcgtcggagatgatgcagagctcctggctggatgcgccgccgttgcggcggacgaactcgagcgccgcgtagccggcggccacgccgccgcccaggatcacgtactcgaacgcgcggcccatccgatgaaccggtgatcaccgtctctacctgcctctgcttccctcgctgccggcggcggctctcctcctccattgatgggcttaagtatccgaccagatcgtgccatggtggcccccgccgatccggttcttggcttgcgcggaggagaaaatggcggcagcgggaacgatgccttgctcgcctccgctgttcactcagcggggcccggtcgtccatggcgatgccatgttatcttctttccctcgccatcaagaaatgactgcgcatggatgggccggcgcatttgattcgagggagaagggaatccttctcgatcaaggtaaagatcgccattttggtctcgatgctcttgcaaattgcaattctctcttaaattttgttctggctgctgctgacaggagcatctgcttgaactcagacctgaaggtaaagatcgccatagttggtctcctcctgcaagttgcaatactctcttgtaatttttttttctggctgctgctgacaggagcatctgcttgaactcagagacctgttgattagagatgctaagaattgatttgcatgaaccctgaaggtttagtaaacttagatgatccagaaaataatacgtagcaaacacttgctcgttcttttctgattatggccaccagattaccgtgggtggtagcaagctttccaagttctaaacggtgggatttttgtcaaagctttcttcaacttttcttatagaaccttttgaaatattgtcaactttctaatatttaatccattcatttttttctctctctcgaataattgtcataaactcaatttcattttttttttgactgaaaaaggtagagaggccaacaggcagtaggaaaaagaagaggtcctccagatttcataacagcataccatttcattaaacaatatatattatgggatctgtgtatttgtttacatttggtacaaagatgatactttcatacagattgtacatgatttttttctctgatacaggttatacaggacttttctctgagtaactttagtccatcagttatgtaggcacaggagacgatgaatttgcaaaaggaatgagtcgctcccagatttttcaccacctacggcgtttcctgccgtaccaataaccaaatgcagcaatggacgcagctgcaatgacaccagccgttgcatgccatacatatgtaggcttttcaccaagagcaagcccaccatcaggcaagtccttctggctttcttgaatggcaaacatcagaccttgcttttcaagttcagcaatgtttataaccttagctttacgccgaacaacattcgatatcgcctcgtattcttctcgacttccaccttcaagaaatgcacccctaatccggcttttatcaacccaataggcaccaaaccttgggctgctgtttgtgaagtctccaaagtgaaccacttctccggtattgttcccatagaattgccaggataatgtgaagaccctggagtagaagaatggcaggtaatcgatgtccttagtttttgaaggctccaggatggctgcaacagcatgtctcgctgttctgcgagctgagtcaacatgctcaagccgtcgtataacaccatcaaagagcttgatagggaaggcagcaacatcgccaacggcatatacagaaccatcgcttgttaacatttgtccgtttacctttatcccaccttgctccatcaacagctgaccttcaaaaagaccagtgcttgcacggatgccaataccaaccacaaccatatcggcaggaaggtgtttaccatctttcaggattactgaagtcacctgtgtatacacagtaacattcttatttcaactgtcattgtagctttaagtcttttatatcagtagacgattcaatttcatcaaacagatttagacttaaaaaatgagcatttttttacaatccttgaggagagggtgttgtgttgaggcactaggactaggaagtcctgaaaattaagacaaaagagtgtggtacctcccgatgcctccttaaatatccaaagaaaacttcagagttagagccaaaagaggttggcgttgattttaatttggacacattcaactcaataccaaaaggaaacaatgggtattttttgaagctaagctcgtcatactcatcgctgtcacatcatgtcattgaaaaatcaaacaaattttctcaggattaccttgcctccaatcaaaggcaagatacgaaaacctagcctaactatacccatcacatatagaacagttccagccaaatctaagtcaatactgaggcctaagcaacaataaatacaataaaaaagttggataagcacctcaaagttatataacgatttgcatttggaaatcagagggagtacttgttatacaaagtacttgttatactgcaaggagtccaaacttgtgttgggacagaaactcaccttccctgtcgaatctttttcaaaggatgtaagcacagttcctttgacaaaggtaacaccttttgaagtgtaatagttctcataatattctgcaatttttggtgtaaatagacgggccactgcagaaaacatgccatgatcagatttaaatgactatgagaaatctttacatcatatctcggggattctggataacacaaatactagttcagagttcagacagttttaagtgatatagcatctactacttactgcagtggctttcagggaagaccatggttacttttatcctattagtaaccaatgctgctgcgcactccattcctatatagccaccaccaatgacgacagcatttccaccaggacatgatttcatcacattcactaacttatccgcatcatcaagattgcgcaaataacatatgttcgaagcatctgatccactgattccaaactcttccagcttcaaagcctacgtatgtacagaaatacaatataagcaggcaaaatgaatcaaatacaacatgctagatttttgttcacagtgattgaaagcaagacaagatgggctaaaataagtgtaaatagattcaatacccgagcaccggtcgcaatgataagattcttatagctgatagtttctccagtggctgtaagcaatgtcttcatccttacatcagcggttatcacttttgttccaagaacaagttcaatacctagtcaagttcacaattagtaggtagaatacgtatatgcacactaaagacatgaagcaagcagatgtaaaattatcttcataacttgataaaagaacagataaaagatcatatagatagttcatttagtaagttgctcctcaaaccaagacggcccagacctttaacaggttcgatgtttacatggaaaccaaactgtatcattcagcagtaactaatactacataagatgaaaggtaaaccagtaaaaaaaaatctttttaaaaaacctaccattttctttgtaccattttgccgtcagtaattcatcattggcaccaacgcaggtatgaaatcctggaagacgagcggcacctgtaaatagcacagggattaataacagttagcaagattaacaatctgagcatcacacatgggatatctgtagacaccttggtaagcagaagcgttcaagcatagttgaaccagtagcatgaagaatcaatacatgctaagatattttggaaatgaaaacaaggttattttttcatgggtatacaaggaattttctctatttagagacatctgtcaactattttttcatctgctagaagtacttaccaactgtaaattgaagcaaagatcatattgtctattttttgacactcaattctgccagttcaatttatttttatcatgcaaccttgcattgtaaacctcaaataggcttctatggtacacttttctcagagttcacataggtctgttaagaaaagggaaaagtgaacagactgttgaagatagtggtcctatatgggtaaaccaaaaacatatagagcaaacaggacatgtgtgtttccctgctgtggttttgaagatggatagaaccatggaagacaaataatccatagttccaacagaacatgtagcatatatcattggactattctgcttatataattatgcagaatttcagactacacacatggtgttccagcggaatgctcagctataagaagtgtgtggatgcaccttctgggagtaaatagcctttgcttagtgccggacgttcataaggagcaacctggcaagcatacaaaaagaaaatatcaccacatgtgcatgcatccacagcagaatcatagagcattcagctgagcaataattctgaattatgttttgcaagaaaagaatcacatccctattctctaaaaataggtccacatgaacataaacattcttttgttcccttggtctgtgtcccaaaattcagctgacacacatcttcagggacgaaacttcctttcagttatttttgcagtattcacgcattctttagttcatatccaagcaaggattgatgatctttatatctattgttcattcactgtgaatctgaaggccagaatgataaaatgtgaaatcgtttcctctcctcgtaaaaagataactttttttttatttgcacaactcgagcggcaacccaagcaactctttcctagcatatccaactaaacaaaaacggaccaagcaatccgaaacattgctagaagcaacagttctactactagtatctactcaggcggtcaaaacacaagttttttctcttttttttcgagggagaggtattagactcaggggaagcagcagcaaaaggaggcgtcgtaatataccgtctcttcggagatgatgcagagctcgccgcgggagtagccgccgcggcgggcgaactcgagcgccgcgtagccggcggccacgccgccgccgaggatcacgtgcacgaacgcccgccccatccctcctcctcctcctcctcctcctcctctcccctcagatgcgggccatacgctgatacgcagctcgctgacctcttttcggcttgcgattgcgagccgtgcagttcagggggggttgggttggattggggaagatgacgaattgacgacgatatgccttgcgttcccctgcctgcctgcctgcggggcccagtctagtagtttgttgctatcccctcgcgagcgatctcgtgtggtgtggagggcgggatttcttggagtattttagtttgggattttgtttttgtggatgaagaatatgtggaaggaagagtttttatttttattttttatttgttatattttctgtgttggggcgtggaagaagcaagaagaagattgaagtaaaacttgtttggattggagataacggttggttgaatttttttcccaataaaaagctctaaaaacatttacttttttatataataattaataaagcgtgtaacaggaatgcacagatccagcatcaaattgaaccacaacgtttggtttattcgtttattctcaagatgagagattagagagatttatttcatgcatattgtcttttatactagtcaccagcttacccacccgaattttcaaaaataaagtgttaaaggtaaaaaaaaccatcggtttacattagagcgaagcaaggagagaatttttttttatttcaggattctactatcctaacatcacatttgaggtgattggcccaaagagttacggtttggacacacttggagagtagcctagttacattttatggctgattgcggaacacgatatcataccgatgattccacaacccctagaagtatagaaggtagaaaatctgaaagtacttgactgggagccaacttggtggtcgtaggttgcaaaggtattgcatcgaggagatgctcggttggatcctcattgaccgccagaatgattccacacatattgtgaggtggaattattctctcttatctcttttcgaacgtttatcggctctctccatttcatattattataagacgctttcattttttcaaccatattttgaaaaagaaaacatagcaacattatttataccaaataaacatattatcaaaatatatctagtgttaggtttaataaaactaggagttgctagatctctttataataagcttcttaaaacatgaaaaagggtggagtatgaatgagtagtttcaaaattttaatccatacaaataattgagatatacaatcatacacacaaaaaaaagataaaatatcgatgtaattgattatccatgtgtgtacttctaattagatgatcggatttttaaagttttggccaatttttatctcaaaagccaaaccttttttttaacaggaaggagcaaggttataaatggctttggtactctgggctgtgccgaatctcttaggaagatgacggcccataacacggatgccaggacggcccaatcgcggttcgccggatcgctcgacgcggctcgcagtcgagggcaagatcgccggccgctccagaagattctagaaaccgccacagaagcctccactgctctcgcccgcgctgtccaatctccgtgtcctgcctcctccgctcgtgccgcctccacccctcccaccgcctagccgtccgcgtcgtcgtgtggtaaccttacccccgtggctctccccaatgcgcttttctgcgcgggccgagacgcctgcccctgcgcgctgctcagcacgtgcgccatgctcccctcatctcccacagccgcgccgccagttcgtgcctgcgctccggccgcccgactcccctcgtgcatacgtacgccaaagtgcagggacatgacatgattatgggattgatggctttgggcacgtagctgctgccttgaaatttccagcaaggctatcagcatgcagcaactctgtcatcctccaggaaggaggttgcgttgtttcaaagcatatgcctcaagtttgaggtctcaaatatatttacggtgtcatgccaaatgcggagcgcatcagactgtcaccgttaatctcctttgcgggctggtgagctgcaactgcaagagccgatatggcagagttgtctagcttgccagtagccaatcgcaggcaaatttagcactgttattagtactattttgttctcagcacctgcgtatgcaaattaagcagttgatattgcccttctagtgaaaatctgattgatttttttttcgtgtagggaaatgccacatgccctagtacagttgcaaaatagtggttctcttgaatttttcatgtatttgatcagcaggttgcaattaataggtactgacatcagtctacatccctggcgttgcattatttgcacatctgataagtgcagtcaagaaatatatgatgcttttcctaaaaaagaataacatgatgcaataataccaacttttctatagatcatcccataaccttttagtcattgtgtaatccatcagcactatattatcctatagcaaatattgccaactcaagcgaaatacgtcgttgtcttttggagctttagtaatgtcatctggttggcattgttcacgcaatgctctgtatcgtataaagcttgaatttcatagatgttattttaactgatttttctctacgtatatctggttggcattgttcatgcaatgctctgtatcgtataaagcttgaatttcatagatgttattttaactgatttttctctacgtatattttcaggcttcaggatgtcttttttgtcctattgagttaaaagatttcagtatgccttgaactatcccaagtgacactttatcatacatcagagaccaaccagcatattgttgtgcatatatatgccgccaaaaaactgctgccccttgaatccaacctacaaaacacacggcaagaagtttaggatcgccattttgatatgtgtgtatatactatggttcaactatctggtaagcgccgtaggcctgtatccctgtacctgtacggttgtacatattgacccataccaccatatatatgaggtgcttcagatattgatcgcttcaatttacatgctacaatatataatttgcaggtactccagactaaaagcaaaatattttcggtatgaaaacttatgaactgaagcaaaagccacggaaatccacagggcaaggggacttttgtgcttctgcagtattcaaggtaagtcttcgaccaccgaccgaccaagtaaccagaatagtgggcctctctagtcatctttcttgtctgcccatatatgctgtgttcagttctctgatgtttcaaggaactaccgtattttgcataattttctcatgatgtaatatagctggtcttcacgagagtcattttttgcgttggcaagggagtactgaactactgacttataaatcaatttctagggaatgtaatctcgtttcttgcatgtcacctaaatagtcaaaaaaaaaatatacctttttttcacaatatagattaatatgaattgtatcaccttaaaaatatgcaaacccaaatttgacttctataagttacaacaaaagaaacaaactaaactgaaaaaagttatagtgtatagtcatagttatatttgttataatttgtagaaattaaattcgaacttgtatgtttttgaagtgatatattttatattaacaaatatttaggtgacatgagaaaaaaacgagggacatcccctccaaaaaaacgagggacatcccctcaagatagaacacctgactttttagttatatggtagcagagttcatcagcatgttgcatcgtgtcaatctggtagaacagtcctttttgctactgttactgtaaagctagcgttgaggctagctagaaaacatttgctaagagaaaaaaataatctcgcattgaaccatttgtctatgcctatgccagatactacatagttctttcttctgccatgcgtgatctttttccccttaatttcctactcaacctagataaaacatttatgaatatgaccacatgtgtagaacaaacttataatctctagcaagccagcatcgtgtttaacagaaccatgcacgacaatatgcatgagctggaacaacagcagaacatcaccaggacttggaatagttgggaaatacaaagacaaaacgacgaaaataagtaggagattaccatgcatgagaagatggaaaacagcagcaaagaaattaaagccaaacaattctacgtagtcatactttgttaatgctattagcaaaccgctaatcctttccttcttgcacagattgcagcggctcgcggcgttcgatcacgtgtccttcgcattgcatgcatgctagcttgcttcgcctcagatggcagcggaggagccatggtgatggtgcccgccgccgatcatgccgctccacagtcccagcccgcccagcgagctaatggagctctccggcgccgccgtgcggctcgcctcgccgcaccactcgagcgacagcagcctctccgccgccaccggcttcacctcgacggcgtcgtgctccgcccgcaccgcgccgaacggcagcgccaggtgatcgccgagccctgccgcgaaccggagcgcgctcagcgcatggtactccgcgacgccgccgccgccaatgcccatcatgccagcacccatgaactgcgcctccgagccaccagcgctctccagcgccgccacgggggagccgccgccaccggagccggcgaagacggggtcgtactgcttccagtcaaatagtccaaggctgcagagcgggtcggccgcggtggccgccgccggcggcggcggcgcaagatgatgctgcatcccggagaaggacaggtggagtccggtctccatgtggcggccttgcagcgccgccgccaccgccaccgcgggctgggcgtgggcggcggccttcttgggcggcgcgcgcttgttcttgcggcagccgccgccgacggggacgttccggagcgagccgcccttggtccagtagcggcggcacgtcttgcagaagtagcgcggctgcgagaggctgtagttattgtagtagcagaacttggtgtgcgtcgactcgcaccgcgggcacttgagcggctggtcgtgctgggggcgaagccggcggtcggccgccgccgccgccgcctgcatcggcgcccgcgggcacgcgatcagctccgccgacggcgacgacgaccccatcccgtgctcctcggggacgatgccctgaaagcaaagcaaaacaagcacaccacaccatgtcacctatccatcagagaacgtgatcggtaatcatcagcggtgacaaagtctgacagagagaatggaagcctcggaatgcgcgaaagggtttcgtcgtcgtcgtgggctggtcccatgcatgaatgcatggtggtggatgatgtctagggtttctcactctgtgagctacaagaccagcacaaagtacaaactgcaaagatggatatagcttatgatggaggcatcaagtttggattaaagcttagatctgggctcgatcctagggcagagaccgtacttttgcactcgcatcgatctcacttgggtctgttgctcagctagtagttttagctacctgctgttcttctttacatcacgtgctaaagttacaacaaatatatgttatttttgcattgatgatagggcccaaatgtacttgtcttgatctcttaatcatgttccatgaatttgatatggtttatacatgtacacttgatgcatggtgagatactcccaacaacagtagcatgcatgcgtttgagcttaattaaattagttcttcagcaacagtgcttatgtacagtactaatagaccttgcacggtaaagttaaatctctgtttataataaatagtgattaacatagatctcttcttgtacattcgcgcatgctaccttattatttctgtttagtttgttcctcggatttatagctgttgaatagatcgatgcagtcatgcatgaagctagcttagccatgttctaaagttaaagtaaaatttaacagatcatatatgatcaaaccgtacttgtttgaatctcttttagccaatgttgttgcttttgcttgcagagtgccagaatctttcaggtcagacactttccacagtttctcgaaatggatatcaatgtcagttggcacatatactctagattttccactattattttgctagtttttttttcatctggagttttatgcatgcaatagatttgttatggatgtatctatggacgcatttatattcaagagtattatttgcatattacatagattgatcatgaagtgttccaaattaaattaagcaacaaaattgaattgacagccaacagtgttttaagttttaactcaagggaaaagatgccagattggttgtatcatctttgtggaacaaaagaaaaggaatggaaacacaaaacaaggccgtcgagtaaatataattcgttaaaacaacggatataaaacagtcaaacaacacgtgtggaacgaatgaacaaagttagctaccctgatcgaaacagccattttttacaagatgtttaattccatataccgtgcccttcatatatacagaaaataacaccagaaatctgttaatttttcacaagttttgtattatgatcgatttatcaaaattcaaatggaatattggggtatgcttaaagatcagcctagttaatcatctgtatcaaatgagctaggagttagcgctgcagatctaaatcttgatcggttcctttttttttcttaattcctgttctgcgcatcgatctaacacagtagcatttgatcaattaattaaaagtttttctcctacggaatagctataggcatgcatggtcatggatatggatttacgtcgttgcaaattaaccagcaacataccaacgcatccgagcaagtaaaaatcctaacaagatcagaaagcaaatgcaattaaacctttctttttaaggacatggagaggcagccaataaatacatatgcacaagaattttgcagctagctattctagcacatgcacgcgagattgcatcagatgcaaaattaagtgtttgcgagatcatcgtggtatatatgcatgcgtaccttgagccagtcggagtccatgcagatatgcatcgggggagctcctgccatcatcgattactcgctgatcttaatcagtttctttgtcttgctgttcttccaaattaatgaaagtacgtgttaagccagaaaacctagctatttgccgatagacactcctgatgaaagtactacttttgctagctaactaacactgctccatgaagtactaggattgtcgacgaatcaaaggatacagacagaacgtgattgatcaggacaggaattaagaggtctgaactgatcgatagatctagctaagtagctaggaataagaacaaacaaggacgatgagaagaagaaagggatcaagatcagaagctagatagccatggatcgatcgaactgctggataatggagtaggagtggaggtaggaggggaagagaagaggagctaactagctaatcagtcgatgtggtgtgggggttgttggtgatcgactcggtggtggtggtgggagatgtgaacgagggagatgtgaataagaaggggagggaaagctgcatggccaaaggcggaagagagagatggagagagagaccaccagttcactgctcgtccgtcctcgcagcgtgccgggcgcttggcctatacatatcgactgctggtggtggtgtcacggcagctgggctggcccacactgtcgggcatacgcatcccccaccgtatgagaagacgaagaaatctgcgtggggacgcggcgcggttgaggctgatcggccacggcccctgcctagctaacgcgcgcgcgcgacgtagcttagctcgtcggcttcccagtccgcgagacgggtgtgaggcccacgcgcgcggctggctcgcgcggctctcgcaccccgaggcggccggccggccgttggcctacgtatgcatccagtggtggtgagtggtgtgactggtgttgcaaccgcgcgcgaggtagggagtagtatacgcgtgcgtgaccgatgctttggctggctggctggctggccgaccgaccggccggccgcggctgcgtgccgggcggtggtccaagtttatggctgctgggtgctagctggagcagcgccggcgcgcgcgcgtttcccaggtgaaaaatacggagagcggcgcagtaaattctgccgatttcaacggtggagtggtccgttcgttccgcggcggggcctctcggttaaaaatcgcacggtttgttgaattgttgatcgattgagcaaatttttcaagttataatgcgtcagataatgtactgactgtcattatctaaaaaaaagataatgtactgacgatgagcggggagtagatggcatgcgccgcatctggcgtgcagtgtgggatggctaatgtcaatcggctgctcgaccgagccgagccgatactttggtcaaacttttgcatgtatgtacacactgtatggtagtctcacctcgtaatctttatttacgatgctatatagagtactgtataccttagttaagaggccaacgtggcaggtatacatgcgtggccatgacgacaccagagccacgtggaatattttggtcctcgtgataaaggagagatgagaaaaccgaaagctcactccaattgggccccatgtaatgttcttcttgacccaatcgatcgaccgggcccctctcctcttcctccttttttttttttacttcgtcgtattattttccccaacctgctcaaaatacacgacgaaaaaactggtcgaaaaggtactgtgttgacaaagacggtgctccaaagataggcactgttatcactctctttcctagccattcctttcatttgtttttaaccaaatagctacttgtgctaaaacaaccaaacatttagaaaacaatttacaaaagtgaggagaaaaaaaggcgctaaaggccgctgttcagtttatcaccaacgtggggtcgtcaaaataaacaacaaaattatccagtattccaatgtgaaagtgttccgcctcaagattctagtactccactagtaagttttttccccatactgctgatgctcaatactactagtacgagatttcatgctagtactccatttgccatcactatcagatgtatcagtaaaaaaatgaatttttaactttaaatttgaagttaattttagattttcttattgtattttatttttttagctttacttttagatcattaataacacatatataaatgttttatttatagattatttttcatttgcaaatatatcatttcagttttttcttcaatatgtcaagtgtgcactatccatctcaactagtaccagatattacagagcatgagaaaaggaaagtgtgccctatccatttcagggagcttgctcagcaacactgtagtaatcgtacagcactgtaatttgtttttactgtaaaagtacggcaatacggattcctagtctacgtacacaaccggtgtggattattttttggggtcgttcaaaagcatgtttttggggggtcgaaaggcatgtgattgcaaagaagagacaaggatagcagagccgaagcatctctccctgtctttgctcccccctgctccctttctttccagattcaaaaaccattgtttcctttgcttttccgagctcgccatccgcaagcaaggtatctattccccccaattccaaatctctcgctctcgtcctctgtgcatgtagacatcaggcttggtgtcgcgtactgtgtcagtcgatcgatcagtcggtcagttgccacactgctgccacgcatccaaccccacatgaaactgtgtctgatcggttgcaacctgtgcgcggcgtggcgtgcaggtttctgttgtaagttgtaaccaaggccatgaagagttcgtggtgattgcggttacagtgctattaagaaatggagaaaaccgctgcgtttcagcaggctgcgttgccatatcgtcgcgtaatttctcggaggaattccgccgccgaatgaagtcacagatgcgcctaaaactaaaacagtcggcaaaactgcacggcggcgagagatctctcccgtctctatcggaattatttggggacgacctttgcatgaaaagaaaatagtgctagtgatgcgacataacactctcaagaaacgacagaagttaacgcgtaaacgacgtaagggttgagcaataaggccagtcacaatgggggtttcactggtgtgtcatgcacatttaataggggtaagactgaataaaaaatgattatttgcatgaaatggggatgagagagaaggaaagagtttcatcctggtgaaactcgtcagcgtcgtttccaagtcctcggtaacagagtgaaacccccgttgaggccgattcgtttcattcaccggatctcttgcgtccgcctccgccgtgcgacctccgcattctcccgcgccgcgccggattttgggtacaaatgatcccagcaacttgtatcaattaaatgctttgcttagtcttggaaacgtcaaagtgaaacccctccactgtggggattgtttcataaaagatttcatttgagagaagatggtataatattttgggtagccgtgcaatgacactagccattgtgactggcctaacaatggaggactgtactatattttcccggcccttcccgttcgatgctgttaaaagtgaacacgagagatgattaaacagcaaatgtttgacacgctcacgctcagatatactactactgtatgactgtcacaacgagcagagcagaaaccgtgagcggtcaagcgcgacctggcacggcaggggcagcagcggcaagccatacgcccatacccacccggctcaccaataacccaacactcctgcgctcctattgctggacgcgcccggtgcgcgtgttcccgagcagacaccgtggcctactacacggcccgcgcggcgcagtaggtgagagcgaggcgagaggcgcgcgtgagcgtgacacgatatctgtacgtgtctgcccgtacccaagcatcggcgtgctactgtgtcggcaggcgccacccgcgcgcgtgggcggaggggcgcgcgaatgcgcgatccgtgcgtgcttgccgtgcccggtggatttcgaagaaaacgcgccgcgcgggtagcgatcaccgagtgcggcgcggccatcgcgtgaaaacaccgagcgagccaccgctgggcgcgccggctcgggcgctggggccgcgtgtggccagccagagaccgactcgcgtacgtgctgggccccgacattgtacgtgctcgacgtgtccctccagggtccagagctccagaagccaaaccaagttttgtacccgcgacaggtctggtgtgccggtagaaatcggctagaccagccgcacccccgacgtcgtcgtggaggggccatgctggtcgggtcgggagtcgccgcctggtacgtcgtttccatcgtgagatcgctcgctcgctcgcccggtaagcctgacgacgacgcgccgcagcggccgggtcgtgatcaaacgggccagccgggcgcggcgcacacgtgtgctacgcgatcgagagaattaaattccttcggatttttgggtcccaccgcgcgctcctgcagctatcgaacgatctcccacccgtacgtgcgcggttgatggatcgaccgagcaccatcaggttggttcggttgcgaggtcgctcgctcgatcggcaggtcgcttcacatctttgacccagagcacccgtttgtcgaccgagttcatccgatattttacacatgtcacgcttatgattgcacgaaccatcaaactcgaggtgcgtaaaaataaagcccgtttcagtaaaactaccaatatacataactcacgtctcaacatcgagcttatgctttaggagagaaaaaccgggcacgcgtttacgtcacctaaccctgtgtttttaaccggaaaagacagagcattgttatatcaaaacatgttgcacgggaaataatcagccgccgcgggtcaggttattggcgtctcgattagtaaatcattgcaagtttgcaacttctcaagatgttgaaagaatcaggtttaacagttgatggataacgcgattttaaagagtggaaatatttgtggtttttgtcactgtcccaatccgatcgcaatcggtgcctgctatccgctcccagtcaccgtctccgacaaagcgtgtactttgtgctgaattcaagtgctaacttgctagtagtatagatttctttctccatgaatctggatattaatagctactccatttgtttgtttgttttttctttcttgttctatttcaaacgtgcgattctttaatgatccatgtaaattctcgcgtttcaatcattctgcagtgtgcaactgactatgaactttgtgaacagcgagatatggttatgtgagcagctccatctccaatagatcagcagtatccttatgtcagcaacgttttgacaccatatatataagctccaattattgcatcctacagtatacctgagctaacggggaaaataaaacatcgtactctgatggagttatgtcgtcctcagtgcctagacaggatggacaagaagattttgcgtgagatcttcgctgatgggaactcactgcggaatacattcatccggtagcgttcatagccatacataacccaggaaatgcttctagcaaactgctacgaactcatgtccagaaggcagaagctatcaaatactagtagatgatagatcacggaagagataaaactgcattaatatagttttatagccgatactactccgatctatttatggaaaatactcgtatgtactttctctatcccagaataagttattattggcttcttcggtttgtcccaaagtaaattcatttttaagtaattcattgcagcagagtttatgaaactagggaataaatgtattgaaagtagatacagtggaaaataatagcatttagattttataaggagtgggtaatataatcttttgttttatattggtatatgggatttaaaataaaattatcatggaacgaagagggcatatatgttcatcctattgttcggccgtaaagcaaagttatcatagactaattagtccgtgtccgtaaataacacagcctatgattaagagggccggaccaagaattgcaagtagatggatatatctagtggcccaaaatacattttggcccaaatatgtagtcgtcatggtcacgggaatgacgggcaccgccatgctttgtttctccccggcgcgcgacgacgagcagccagaagacgcggcgcggcgctccacacgccggacgcgagtagcgctgtcgaatccgacgtccactccagcgacgcggggttgcggggtgtccttgtccactagtcgcttgccttgccgcggtcgcgcgtaccatgcccgtgccccacgtatcggctgattcccggcggtcgtgctgcccatgccgcttgcgcgcggcttgccatgttgttatgcgctgattctcccctattatgccgttctgctggatccgagcgccaaccgccgaaactgctcgaacgtcgcgcgcccacgcggtccgcgagcgtcgcggaggtcctgccatgtttgcacgaaaggaccatgttccgatcgttagcagtggacaatggtagtgagtctagcaacctaaaagagttccagaataagcccccgcagccaatagtccgcgctgcaatgaggcttattgtaatagccatgggcctagagcccaccacgagtaaggcctatcatgaatcctgatcccccctctcctctgccaaaatggataatgagcgtcgtgacaagctaccgggttaggtttaaggtttcacggaggatgggagctgttgtgaagagagaggttgagaataagggttagagggatagcatggaaggtagcggacaaggacgggtggtgaggcaacggcggcaccatcaaaggccagagccacgatgtcggcaccacgcgcggtgttggtggctgggggcaaggggggcggagaggaagttgaccgagcgagccatgcgggcatgtagatgcctttcgacgctatcgatgccgaggtgacaacatgctaaggatggggctaacatgctaagggtcaagaaaagagctaacatagtggttggatcaatctcgtaggaggaaactcatcagaaggaggagggggcttgctattgggaggtcattgccattgcggtcaacatggttgagctcgtgaagcatcagcaacgctcaactctcccgcgtgcaacagagtgaaaatcatatctggcacgtacgcgctagcagcgctgctagcgcacgcaagtgtgtgcatgttaggcctggtgggtcatcgtaaaaaatggtctcgactagtgttaattactgatttcgcgtaatctatttcagataaccacggacaagcatgcgctccctcttgtagatcttttttcttaaaatgttgctgcaatttttttctaaaattttaaaactatattgaaaatttgagactttcgagtcaaatttaaaacttttcagctagaaattttaaaattctactttaattctaaaagctttcaatacatttttaaaaactttttactcaaattttaaaacttttgtatcaaaattcaaaaaaattaactcaaacttcaaaaacttttaactcaaaattcaaaacattcaactcaaaattttaaagtttcaatttcaattttaaaagacttatatcttaaaatttaaaactttcaactcaaaattttaaaactttgaactcaaatttcgaaatcattcaactaaagaaggggacatgcgcatgggttgggctggcaatataaggtgggccacatgttggctttttttgatgttctgcataccgcatgggacttaacatccgcctgataacgctcccaccccaccccaaccccccccccccccccccccccccgcgggagctctagggttggtttgatttgtgaactaaataggccttaccaaattttgttggtgccaaattttggcatgactaattttggtaaggcaaagttgtgtttagattgaagccaaaatagtctaagttcactattgaaatggcatattttcttaggcatgtcaaaatttggcttcaaaccaaatagacactaaacactattaaaattgacaaatattggtaaacctaatttaggcctccaaccaaaccagcccctagtttttatgcataccgcatgggacttaacatccgctgacatgccttcctaaaccttcagaactgtgtagaatcctaggcctctgcacgccatgcagggcaacccatgccagagacctaaatccccaacctcgtaatctcccgatcgaccacaagggactcatcttgtgctgcacacattgacgcattagttcccaatgcaattatggttcatggtgcgtagaaaacactgctgaaatggtgtccatggtggcttgccagccgtatgatgtccaccatcctgactcgcgtgaggccacaactttccatgtactttatttgttttaaaaatatagtaacctagaatcgtattagacatattctattactacgctattatgatatgtctaacttaatcctaaattgctatattttgaaacatatgatgtaataattttttcgtcgttatatattcctcttctcgacacatttcctccagcttcgttgccattgtccgacgtcctacgagttctgttggaggactcgttgacaagatccatgaagcggtcgagcggcggttccagcctcatgaggcacaccaatcaacacactgacaaccagaattaaatttaaaaatataccgtttatttattttttttctcattaatattcggtatgtaaatttttttatacaaataaactatcatcgctgattgaaagtgcgaaagtaaaacaatatcgctgattcattcagcgaaagtgatgatagcgtgacgataggccacggtctcgcaggctgttggagcgataccgcactgtctcgcatgaccaggacgcgagaccggcgtgacagcaaagacaagaagcgatctcgcttgagcagcgtgcgagatggcctgacatggctcatgattagcgtatatataacgattaattaattactaatgatgttaattaaataaatattaattaattaattaactgctaatgacactaattaatttattactcacgagaatacagtggttagggaagcgaaggagtggtcttgcgcactcacgtcgcgagactgagcggtctcgcacacctgctgcgcgagatcaagtaattcgctcgatctcacactttcgttccgcgacagtggaatatttgtacaaattttttatagacgtgtatatttgtataaaaccaataaaaaagaggtatattttaatttttttccctgacaaccaggcatcgccgccttctacagttctactccatcttcgccgcaaggtggttctgtctgcttgagatgccacgtatacgcctcgaacaccaatccgaacacagttctttcctttatcgtgtggaaagctactctgctgctcgccaaagaagcacattgctactattttggtggcaatctggcaaatgaactcatggtttgaataaggaaaacgattctaaacttctgagagacatcctcttattatttacatgttattcaattggctataaaaaaaacttaagaaatagattagtatgtgataaagcactatacagtcaaatttaactactacaaattataaacgaaacaaattttactatgggcttattcactttgctaccattttcaaccttaccaagttttggcatcgccaaattttggtaagtgtaacagccctaaaatttgacaactttttaaaaccgatttagtttgctttggttctctaaaaatataaccgtcgagttagtagtttatttaaaatattatttttcatgtttattttcgatgtttcttttctcgtttaattttgtcgcaaagtgcatatcatccctcaaatagttcctttgatccgattcaattatatcccgaatgtcggactatctaaattccgcaccaattcaaatcctatctattttaatcttccccatattttctttttctctatttctaccttaattttctttttccatttttttcctttctctgtttttctccctttcttcccttcctctgtttttcttttctttcttcttcctctattcggctaggccgagccaacgcctgtgcctccccgtgttgcctcgcgccaatcccgagtcgcactcgtgtgcgcccgcacccagctcgtgccagcccgcgcatgccacacgctcgcacgtgcatgcacgaggccgatcgacgaacgaatacccaaacgacacctccagcttcccgcctccgtatctcattcgtctctcaactagaaggctcaagaccggaggcaaaagaagcgcagtttcgacctctttcacctcctcaaatccgcccctactcccattaaatcaagtcgtcgtcaccggaggaaaattccccgaaacactaatactggcgccattgattgagctccaaaattcgtcgcatacatcgccaatcctctgaaattgaaggtaaaatcggattctccatgccgagtactccctttcccctctctttacccatccaactcatcgccggaacgtcgccggcaccgcctcccggcgtcaccgctctgttcggccgccaccagccgcatggcgcgccgccgctccagggcgccctagctttggccgtcgccaccctgggactcctctcgcctcactgaaccttactaggccgccgccagcaccggagttcaccggagtcgccgccaccatggccgcctccgcctcctgttactgcccgccgccgccagcctcgccgccgaccacacaaacggaatcgcctcgacccctagatcacaaaaccggtgcccccttgtccaaaaccggcctcctctgccaccagcaatgtgggattccggccaattcctgtgcagaacgagaagaacaggaaatccacttttcctattgaaaaataaatcagaaaataccctttttcttttcctatcaagttgaccatccgtttgacctcaaaatcgaaatccgagacctattccaaactcctagaattattccgaatccatccagtcagtttcgttgcaatccgagcacccgttgtcgcgaccctaattttagccatagggttcgtcgttccccgaaattccaaaaatccctaaaattatttctataaatccttttcactcgctgttgcactttgtgatactatttgttttggttatctctgtttttcttgtatttattgtggtaatgattgttgcataaatagaaaacgctgacgttggtccggtaatcggagtgagagaaatctccgcgccaggaggagacgatttgtacgactacatcgagcccgaaagttgcaagacatgcaccctcccttgaacaatttaatcctagtagatagagagttattttagtagcgtacttgtcctttggagtatgatagactacacgaattcttttaagttaattatattgctattattgcattatattttctgttgttgttataaacatcttaatgagccatagagtctaactaacttaggataaaatttgagaaacacttgaacaaactgttaattatttaacatgctattgatttaatatggatattattactgcatatgaaaacatgcttatggaactatttatggctatatgctaagaactgttgacaccgcttgtgagcgggtggtatacatgatagagttcatgtgtttggttttatggacctgtttatggtcgtgatggatatatgaatatatttatggttatttcttatttaaaattgatataataatcaacccccttgtgtcaataagaatgacatagtttcgcccatccacatgatcgagttatcgaatctggccgtatattgctctaattgattaaacttctgcaggcctttcggtgtactggccattagctttcaagtgtgtcaagcaaagtgacatggttcatgtttatatgatttatatatgtgggctcgatgggcctcgagagttcagaactgccctatgggcccatgaagttctgggctgcccatcgagtaacgaacaatggtaagtggatgcggaggtaggttggcacacacctcggaccggatcactccgagcaacatcccaagcatcctttaacttactaggcagaagggagagatatatggagcaatattacaccttgttacttttcaacccgaccaactatgggtatcgtgtgggtaaagctgggcagacgctgcagagtcgttgagtattcgaatacgccgtgctcccggttaatggagatgtgtctatgggtgactccagattatgggcacaagttaaactaaatggctattaattaatatggtgaacttatttattatctaatgttctattcatgttatttataagtaacatttatatttttatgcttattattattgtttaaattaaatgttcaatagtgttgtttatatcatatgtttattaagttaggttctatgaaataactgttaaggttagggtttaaaccttccagctctcaatactgcatgttttatattgcaattattgcatttgctattataagcatgtcttgctgagtaccttttgtacgcataaatgggttcagatcatgaggaggaggatgcttgtgaagatcctgttgacccgttagagtgggacagctatgatttccaggtcatcctacgctcaggcagttctgtggtggagtctagcagtttatctgtttgtagaaataaggctttataggccatatatgtaatggtttgtatttatgttgtgttgtgaagtaagtgacttaagtattgtataatcgaagtttatgtttttatatcatttcatgcgtaactgaacatcctgggcagttacgtattcgtgggacaccatgactttatcgagtgtccccatagtaaggttgccaaaattttggcaagatttcatatgtacttactaaaatttggcaacaaactaaatgtagccacttttttggtaactttgccaaaaaaaaggttaaaaatggtagcaaagtgaacaagccctataatatacattaatttgtttattttattgtaacttgtagaaatcaaaatttaacttgtatgtttgcgtagtgatatataacatagtaatttatcttgttgaatgtttttaatattttttcataattatttaaatgacatgtaaaaaactcgagagtttataattcatttcccttttacgtttgaattgaggcaggaaaacgttttcagaagggtaaatgggtaggaaaaagtacgaattaccccctaaactatcgcggtcgtccgaattaccccctgaaccacaaaactggagattcttcacccctaactatgcaaaccggccgaattacccccctcaacccaatctgcggtggttttggtctacatggcgtacgcgtggcagtccagtcagcaatttatttattaaaaaaatgtgggacccacttgtcatactcctattgcacattttctctctctcttctctcactctgtctcacgcgcacagcggcaggcgggggtggcgagcggtggcggcggcggcaaggcgaggcggcggcagcagcgggagctcgcgctgctcgagcaaggcgaggcgacggcggtggaggaggaggcgagcgacggcagggtgcggctgaggagacgagcggcgacggggtgcggcggaggaggcgagcggcggggaggacggtggtgagcgtcggggatgaggcggcgagcggtggcggggtgcggcgaaggagggggagggggagggggagcttgcgctgctcgagcgaagcgaggcggcggcaggcgtcctccagcgcgcgctccgccgccgcggcctcctcgcgcgcctgttcccgcgccgcgtccgtggcggccttctcctccagcgcgcgcctcacctcttcccgctgctcctcctcctcccctcctgctgccgcggccgcggcgccgccgtcggacgctacgacgacgacgacggcggtggggccgatggagagctgcagcttcgtcgtcgtcatcgtcatcgcgtgttgctcgtgggaggaggagctggtggtcgtggtggtcgtggagttggacgagaacgcggcggccaacgacgccgtggtggatgccgggaggagctgcagctcaggcggcggcggcggcggcggataatgatgatgatgccgcagcgtcacgggacggatgaccggcagaatcgtcaccacgggcacgacctcgccgcgcacccgtccagagttacacgcatcctggtgctctatgaagctctccaccctgcaaccacacgcacacaaccacccccaaaccaaaccaccgccattagcgcacactaaccataccacttaaccaccatctcatcaccaaacacaacaaaaacatggcgattgatccgatcgactgatcgatcatctgtacatgtagatcgatcgaacacgacacacactgaccgatcgatgagagcatgagacaaccagatgaaacccatgggacaacctcgcctcgtcccctctccgccgcctcgcctccgccgccgcctcgcctcgccgccgccgccgcaccccaccgccgctcgccgccccccgcctgccgctgtgcgcgtgagacggagagtgagagaagagagagaggggaagagtgagagagagaagagagagaaaggagaaaagtgcaataggtgtatgacagatggggcccacctattttttaataaataaattgctgactggactgtcacgcgtacgccatgtagaccaaaaccaccgttaattgggtcgaggagagtaattcgtccggtttacatagttgggggtgaagaatgtccggttttatggttcatgggggtaattcggacgactgcgatagttcgagggtaattcgtactttttttcaaatgggtaatggaaaaaatccaaaatgaacgtataatagttttttcgtaggcaccagcgcaccaggtccttggtccttccaaatttctcaggcaagctgaagcgaggtgcaggtcgccaggtcctagacttcctagactttagtctagccagtttgtctgggcagtagcgacaaccaatctaaagaagtgcaacgccagtgtacgaacaagccacctactcctacctcccaatcccaatccagcagacgtcttccaagcaaaaaatattgcccattccattcataaaagggagagacgggtaagggcagccacaatacgaatataagggcccctttgaatcgcagaattgagaaaacgtaggaataggaaaaacgtaggattttgataggaatgtaagtgtaaaacaaaggattgcaaaacacaggaaaaatacaggaatgaccgtttgattgaaccacagaaaaaacacaggaattggatgagagagatagactcaaaggaaagttagcaagaggttgaagctcttgctaaatttcctccaaaatctctataggattgtccattccataggaatttcaaaggattggataggattcaatcctttgtttcaaagggcttcatagaaaattttcctataggattgaaaacctctaaaattcctatgtttttcctccaaatcaaaggggccctaagggtgggacttaaggagctgtttgggatgtccctcccattcaaataccaccaaagcctctaaagtgaaccttatacattgtgagagtagttcttagagcatccctagtagctcatccatatttgacctccaaatgcctatatggatggtcattcaaaaaaaattcccactctaacagatcatctatattacatcatccatatcccaccctcctatactaaaatatattttaaactattaaattttaattgtgttattaatcgcaataatattttgaaatgagtaaattttaacggatatatttttaatggataattttttaattgatgtatttgaattgagtgaagcttttttttttgataaattcgtagcaacatcaatagaatgaatataaaagcacagcaaaaatctaatcgctacatgagtggactttttaatccacaggagctagctagcgaacggacttatcctctcgcttaaaaaaaaaaaagaaaaacgcgagtggactggagatggagaggcgatggcgatgtgggcgagctagcgagcaaggcggtgcgggcggcgccaagcggaggagcagcggcacgggctgctgggcagcgcgacggaggcggcggccgctcgggctgctgggcggcgcaacggggcagggcggcgccgagcggaggagcagcggcatgggctgctagtactactactactacttctttgcaggggcggcggtggctgtgcggccgggaaggcgaggggcggcggcggccgggcgggtgaggggctcggcggcggccaggcgggcgaggggcgccgcggcggccgggcggacgaggggcggcggcggacgaccggcgaggggcggcggcggcggaccaccggtgcgtcctctcttccctctaccttcacccttgatgctcgatccggatgggggcgggagaagcggatgggagtggcagttacgggatggcgtgaggagagagaaccggatgggggcgggagaagcggatggaaccgcagccagtagatgctcccaaaactagtccaaaatgcagatccagtttttctcaaacggttcgtgaacggtgaatcatcggaggacgtggtccggctgactgtccgagctcctgctggctgctgcaatcctgcactgcaggttgtgctctgagcctccgatacgatatgtggtacagtagtgtactgtaccactatgcgcccgtagtcggtactgccctcgtagtactccagaacgcttgtcgccggggtgctcatcacctgtatagcgtccaaactcgcagccctccctctgccgctttcctctcctgcgtgagggtgacaacacgggcatggattacgatgcgacacctgggtcgacctggcaggaatctctcgagtgcggacagcggcggccgagcaaagcagcggcaacgcggcgtgacgcgaccgaatcgtgcccagctacagcaccgcgcatcatgccactgccgctccggtcgccctaatggaagcactttaggtccgcctcagtcctcagttcaagtacttcaggcctcacttcaggacaggtaccatccggaggaattcttgccgattcacaaatcgaattatttgttcttcgatttttacttatttttgtaagaatatacttaccttgtaagagctcaatgaaattctctgcaaactaattcgagttgaagtgcgtggttccttcttcttcttttttcttttttttgaaaacgacacttgatcacaggagactgcaacgtcatctaaaactcctcgttggttctagcagtaggactagagtgcatctcaacgatcgaccatcataacgagttccacgtagctattcgtacatacgctagacctaataatactgcccacgagttcacctaccctgttcaatcgagagccagagcattcaccgaaaacaaatcatggtaagagcaaaaccttatgatgaacaggcccccaagatgtcacctcagggaatttgaaggaggggcctggaggaggaggaggaggcagcaacatgccaatggcgacggcaagctgctgctgccatccatcggcatgcccaagaaaggcgaccagtctagtggccctggcgctcattcctcgttgcccccacaatctgctaaagcgaaggtgggaaagcaatcaaaggaagccaaagcgatgtgatgtcgctggccgggccttctccctgctgcgacggttgctttgatccaatgcaacgtccaaaagcaaaagcacggaagaaaacagtgagtgagagagagaacaggcaggaaggcaggctgcggctgcataccgagacgttattccaagctcgcattgaactgctccaaagagatcccaaagcactcgcctttctcgcgccccaatgcgttcaaagatctccgcgagaaaaaaaaaacagaatgaaaagatgggcaacaccatcatagcaatgcctagcttgccaatacgaaaaggaatttgtgcaattcaaatccgggtcctcttacctcctccatcataaaaggaccacccctgcctctgagctcaaggagacacttccattccatcacacaagccatttcctagtcaagaagaggcagagaagagtgaagagcagtgagcagtagctttgcaacaagagctaaaaaccagcagaagagtgacacaagagaagtggaagatggcgtctttacctcagcccatgggttactacccaacctccaactccatcatgcacgcgcagccggccaccacgtccaggggctcgttcggcccggtgttcaccgtgctcgccgtgatcaccttcctcgccgtcgccgcctgcgtcgtcggccggctctgcggccggcggctctccaagaagagggcggcctccgccgaggaccagttctacggcatcaatgccgtcggcggcgacctggagaaggggttcgagatcaagtacccggtgatgaagccgatggcgagctcccgcgccatgatccacgacatcgacgacggcttcgagatcaagttcaccccagggaaacctgcagcatggaagaacgacagcaagggagacggcaaagggcatcagcagcaacatcaacaacaccaacaccaacaccatccacagcagcatggcatgccccaacaccatccgcagcacggcatgcccatgcccccaggtttcaggtaccctgcaaatgtggtcaggcaagggcagataagaggtggaacattcatttctgcgaagcccagtacgtgattcatcatcaaggtagcttaggttcataacaaacttggatgtatctcatataggatacaacctcttgtcgcaatagtgttcttcatcttcactctagttttggggtggactgggcaaagatttgtactagttccaagcactactaccatattgtattttgtacattaaacccattgagcagtgaagaatatctcattctcaagtatgacattgaagggatcaatcatcaacagggtcctgcggtgcttcatcggccttccgtttgatggtgatgactggacagtcggcatgcttaacacagaactcgctcactgtgcccacgaaaaccctgcaacgcgattaacagcaccagtcattagtacaagtaaaacaggactaaccatggcgcaattcaagacaacacgttacagaatatcaatgagcaatatacatttttcgatatgcaggtgtacgttgttctcattcacatataagtttctgtagtaattcttctaccaaaaaaaaaaacagaagtacaatgtacttgttaaaaaaatgatctaacaattcttcgtagattaaacagaaaatcatgaagatgcaaacaaatagcttgtgtgatagtagaagtctatataagtagatatttttcttccaattcagtctcatatagcattgcatagataaaatgtactacaatactacatcccattcatttcctgaattgggaaaaaagcaacaacttggtaagattttattcaaactacatgatttatattggtcacagaaaattatcatgttctctatgaattacaggattagttctgcacagataactgctccagctgtcctaaaatttagctatttcatagtacaactgtacaagactacaacacaagctggagatattattagttctacccgtataggccactgaatcataaagtctttctattagaagtgcgacattctaaagaaaatatcaaatgagtgtttatcattagggttactccataggcttttttccacagtaggcacgctctactgctgcttgatttacaaggcaacatcttgtctagagcgcacgaataccaaagtctttttttcataattacaaaggcacaagcacacacgcatgctcacaaaaataaaaataagtatgcacgctgcatgcacaatcaacttgcaaacttgagaaactgacttttgggacgatatcagaaccactatgaccaaaaggagaaatgacagcgccatacatagtacagtagttcgctaaatctgttgtgtttcggttctggttgattagtctagatgtttaacatttggactggtttaggttccttgtaaactactttcatcttaatgcaatgatctgcaaatcttttgtgtattcttgaaaacgggggtgtttgaaacaaaaggattttttggatgaattttgaaggtattagaaacattttgatttggcactccggtataaaagggtgagctcctataaatccattagatttcttatggattggcttaaaaacaaaaggccaatctatcatgaggttggccctcatgatccttttcctttgtatctttcaccccaaaattgtgtatttttttctagtgaggcataaacaagtaaacaacctatgagtttcatatgtttttccccaatattttcattttttttcttcacccgttccatatgggcctatgcttccactacatgctgcatgggagtagcaaaaaaaaaaaacttttaagtttgtttggtccattcagttctcaaaatgataaagtcagcagaaagctaattatactcatgctgatgattatagctttaggaatagcaggtttatatcataaaaaggaagtcgagataaagacgtaatgtttggacatatccattttgtagttgggaatacatgccaacctggcaagtatgttatatctggtacagaattaaattgcaacccagcttatcagaacgagacagtgtaaatagttcacaaagttaatctagtacgtgtcatacttgatttatctccactaatcatgttacagccagctccaaagaaccagtgttattgtgcttaaggtatttttataaatcctttaggtaaccaacatggatttcaacagaaatttgagttcggaaaattgttgcttgtcttttttcctagcatagtaacacaatagctgtttaagatgtcacaagttcaatatggaaggggcaagatattgtacatatgaagtgtaaatcttatccaaaaaaaaaaaaaaaaaacaagcaagatgctatgacacgactaacagtaggtacgccttcagagtacaataccatttccctcacataatggacagaaaatgaaatagaaaaaagactgtatcctaacaaccatcacttgttagaaatatcaaacagcatgaaatcaattgttcaaacacccccagtcatcctgtattacttgctcaattcagcacaatttttagaaataaacacatagtattatatcttagtttggacaatgcacacctagtgatggatcatcttatcaaagtactcccttcaattccaagtataagctgttttagcctttctaactctttcccgattcctaaatataagtcaactttagaacttctatgcaactttaccacttaacttccatgtttgccctaccaaattaacggtatcatcctcacaaataaatgtctcatcatttccaacttagtatagatgaagggtaacaaagtcatgtgagtttcttgtgcacaagtctaaaacgatttatatttgaaactggaggtcgtatgtgcgcaaccatcataacacacaatgaagaatacttatatgtgcataacttttaaaataaaatgctgacaagttcaatcacagtcattttgacataaattacctctgaaatggtccaaggcccctacttcccacaactagaagatctggttgaactctcttcacctcgctgcagatgacttcctttggatccccttgtttaatccatgcttcacattttatctgcaaataattagacaaacgccagaacattaaacaaaaaagatcagtactattggctattggagtctgcaatagtcaagaaaacacacttaattttctgtgtgctgaccaatttcaattaaccatcctcaggaaaaggactgaaaagaaatatggaggtttgattacctccagttgatggcattgattcacaaagtgctcgagcaagtgaagccctcttatcttgtctctctgtttcattctctgaaagtctggtggagatgcatagatgctatccatatcatcaaatccttttgattaaacaaaaaaaagggtgattagatagaaaaaataattatccaaaaatacaactgtttaagtgggcacattgcatgggaactaaagtcactcaatgataagggctaaacaccaacatcaactgagccaaaagcatgacaaaacatctaaaggcaggaatgcaggacttctgtagatttgtttacttcaatagactttgtaaaaataagagataattgtattatggtttgtaatataaaatacagcacatactgatgaagtttgtgggtagatcttttatagacaaagaaactatctcactccagcaaagaaacaaaaaaataggtaagataatacaaaaaggaagattttaagataagtgctgcctaagctttggacaccctgtactgaaattcaggtatcagcttaagtgtatcgtggtccaaaaaacatgagaaagcagtattcaggtcaaattcatttggagcaatgaaactgtgtcatctgaatggaaataaaaggaagcagaaaaacaaaattgacaagtttctatacaaggcactgggccatcaacctcaaaactggataatagaataacttgggaaataggtcatagagagtttgatcttcccacagcagaagcatttccttgaacaccagaaatgaataagtagtagtgtagtactagacagtggctcaaaagagaaaacaacagatttagctggcaaacttaaagaaaaccaagtgagtcagaaatatactatttgtggcaagtggatgatctaaaggattcaaaaacgatattgacttcaaattctgtgatttatcagagctctattccatcaaagtatggaagatatgcataggcaaaatcacatcaacacaataggatcgatgactgatgatgggaactatatgtgtaacattattaagcattctcctagtagagcagtaataatacaaattaagtcgaagaagcataaggccagttatgataagatgacaaaaagagcttctacattcagtcaaattttgtcacatctgtacaattcaaaagagcaccgaggaaaaaacaacaacagtgtgtatgcagaatgaccaaccacattcgctagtcctaaacccaacagagaggacaaatcaatcatattttcttttacacctcgcagtacccctgcacatatttgataagatcatatgaactttgcatatattcaacttactggtaaacactaaaatacccccgcctctgccctggcgaaaggcccttagaatccagaaacagtcaaagctactttaaaataaatggtcaaaactaatttaaatactaaatcatcatggtcatttgacttggggaaataatcctttggagttcatgaaacactcaataagtccggcaaaagattctgcacctgtcattagtgatagagcttattcagataccgtgccaactaccaaaccataggccaatagccacctactaacacgtatgaccttaaaaacagcatagcatcgatttatcctgaaatagtaccagcccccccccccccccccccgcagaggaccttgtccacaacccacgcggccacgctcgtcagaggaacctaacactccacagccacacaggtcgcagcagttttaatgaatttgtacacagtaaatcgatcagaaccaccttagtgttgcgaactcctaggatacgcttggagacgatctaccaccaaaatcacgagattgcaaagagctagaaccgaggcattccatcgagcacctcgaagacgcagcaacagcaaagcaaaagcagcccaccaccccacggtcggtggtgtgtggggggattcccgcgagaacaatgggagagagggcggcgcgtaccgtcctcgtcggggacctggacgtggaggaagaggaggtggaagccggcggcgttggagcggacgagcttggagagcatccagtcgaaggcggcgcggcagctgatggaggggtgcgggtagcccttgatcgaggactcgttcaccgcgaccatcacccgcgtcggctccgacgaccccgccattgcgctccgctttgctcccgctgctttggcttcctcggcaagaagaagaagaagaaggggcaggagttttgggggaaatttttgagggctggactggacaaaaggcaatctgctcacttttctttctttatacacgtgtgttgccttgttttgctatgtacacccaggggctcgcccaagcaaaaaaataataataatccaaaatactatagggattacacccttcaaattcatcctaaaatataagggatttattaaaaccccgaggcagtactttattcctcatctaccatattttatattactacccctattctaaaatataaaaagataactaatttttttcagatatttcataatagcatgcttactccgtttcataatgtaaatttttttagcattgttcatattcatatagatgttaatgaatctagacataaatcttacattatgaaacggaaggagtaactatttttttctagatatttcataatacaatgtgtgcatgcatgtatgcaattaactaacaccttcttttaactaaattattgtttttaaatctttcatcctcaagctatctaattctattggatgggtgtattgtatttattattggagtgaagtgcaccagcggtccctaaacttgtgcatgtgtgtcacttaggtccatgaactctcaaattgcattttttatgtccctcaacttgtctcgggtgtcatataggtccaaacgagctctaacccgcttcgtgagatgacgtggcatgccacgctaacgcttatgtgtccgtgggatccacatgtcactctcataaaaaaataaaattttaaaagaggggagattgaggagaaaaggaagtttttaatttcgaaaaataaatgaaaaagataggagaaaaatatgttcttaattttttttctatatgtgactgacatatgggttgtactgatacgtaggcgccaccacggcatgccacgtcagcacacggagcggtttagagcctgtttggacttatatgacacccgaaacaagttgagggacctaaaaatacattttgagagttcagggacctaggtgatacaccaacacaagtttatggaccgcccatgcacattactcttattattgtgaattggtgatccaaacgataatacgataatgaatgtttcttaattttgagttatgagtggtcgtggcttatattttcgaatagagggatagtttattccacatccatcaccttttgtactagtgctttatattcttcaagccatcactatttataccgtgctttgtgcttttactactttcttaaattttagttaaaaggcacataataccttgtattctagacatagggagtaataacatctaaagaaaattatcagcaccgtatatatccaacgggttggttgtgtactactgaacatatatgctttgttcggacaacctagcgtagcacggctacgttgcaaccagccagcaagcaacagcttccagcagctatgcgtttgtgtatccgaaccgttacactatacagcacagcttaaaattgcagtaaaaatctcatgcccgtaatcatcctttacttagaaatgatttgaacagtcaaactcttaaaactttggccatcaataaaaagggtcatctctttattcctcgtatacaactcttgtgacatatagttgtataacttgtattgggtacactgcaacgtgcatgaatcattttgcgtacgttcagtcatcgatctgctagcaggagtagcagtacgtatcagacttggatgtggagactcgggaggtgacgacgtggcgagaggcgagtcggtcgctgacgcggccaggcgggcccgcgtggacacgtcagtcgtgatccacaggaaggctttgctcccttggtggagcatcgtctgatcgtctcatgcttacccgtggagggatgaacctatttttgtttgcttgtacgagttgtgcctagtctatgtaagggccaaggccaagttcgaattgatgatttattattatttatttttccaagaaattaaaagaactagagaagagtaacaagagctctctaaccatgctttccaagcaccttcctgcaaaattttcacacaaatcaaatacaatccaggatgtaaagttgttggtgtgtcacatcggatattatataaactgttgcatagagtgttcggaaactaataaaaaatcaattacaattacagtatccgtcaataaaccgcgagacgaatttattaagcatcattaatccgtcattagcattgtttactttagcatcacattgtcaaaatcatgaagtaattaggcttaaaagatttatctcacaaagtagttgcaatctatataattagttatattttagcctgtatttaatattttgatgcaggtgttcaaacgatcgatgtgatatggtttaaaattttgaggtgggatctaaacaggccctaatggtgtcggtcgaactgtgtcggtcctgtgcaaagcaaacaaagaataaattaaacctcgagcaaaaccggaccgacccaatgagtttatctttcggaatcgctaaattattggcgatagttttctactcccccgtcttaaaatataagcattttttttactctaacatggtttttgagatgctactttgactaataatatctataaaagtaagatattttaaataaaaagagttatagtttgtttaatgataaatctagcaacatcaattttacatttttgatcttttttattttgttgttattaatagttaaagttacaaatatttgacttggcgctatgctaaaaatgcttatattttgggacggaggaagtagtgtggaaccattttttttcttttcaccgttagattttgtttagaacattcaccactggattttgctccaagattcatctagcagcacgcgaacgggagattggatatcacaatatttcctttgcgtcactgatgcactactgctgcgccagcaacttgctttggatggttagatcctagttatatcatctatgtaaattataatccctccgtcccaaattataacaacttctttatcaacattatctttccaaccaatcataactcttcaccatttacttttctcacctacctccactaatcatctaatcacaatcctccaccactcacttttacctactttcttaataaccatatccaactctaaaacttcttatattctggaacagagtaagtactctttactgggcccgttcagctaccagggctgcagttacgcaacagccgacatgcgcagccacagttacagctgtagccgttgcagctggcttaccgaacactcccactatatgtaagttatactccttattactgctgctgagtactccgtactatactgtatgttgtatagatatatttttattttttccctttcaaattctcatttcttatcggtgactccgcgctagagcccagtaggttagttcaatatttcgcctgctaagggcccagcagattatttcctccgcctgatgtttctttctagttgggccacaaaatagtacagcaggtgtgtggatacacggaactaatccatccgtttataaatattcaacttttagagcagattagtgaagcttttgaaattttcactatcatatttaaattaaaataagtttataaaattttgatagtactccctccgtttaatgttataagtcgtttaactttttctcctaatcaaactcctttaagtttgacaaagtttttagaaaaatatactaacattttcatgcaaacaaacatattatcaaaatatattcaatattaattttaataaaactaatttgtgatacaaatggtgctaattttttctataaacttgaccaaactaaaaagcttcgattaagagaaaaattaaataatttataatatgtaatggaggtagtacttttttaagacaaatccacacataacatttttaatgctaacaaactataagaatttgagaattgattgattttcaaagttctaaaataatttgtctaatctcttcctaaattttaaaatctgtcataggtgatgggtaattaacacggttcaagatgatattctatcaatctctactattataaaaattgaagatgttttagctggtacttacgtcatccgtgtacgagtcggtttttaaattcgtttttagaaatacatatccgtattttgagtcggtttttacgttcgttcgcttttggaaatacaaaattcgtcctataaaaaatctcagtaaaaaaactcacatgctaacttgaaacgatcctaactgcaactcatgattttcttaaaaaatatatatatatccaagcgaattctcatagtaaatttcatcttaactaaactgtatattacaataataaaataaaaaaaccttcacctgttgcaacgcacggccatctttttcaaaagtaatgaaaaaaaagaaaatagcgaaataaaaatatgtggattagattatggagttggagtaataatacgattacgaacagctatcagtcgtgggcccgctagtggaaagggacacggccttttcttcaaggaggccgacccgacccgacccgagcgcgacgcgacggacacccaacccagcataggtaaaccccccccccccccccccccaacccaaaccctaacaacaaggcaaggcggcgccgattgctccctccggctaccaagcagcagcgagctcagtgaacccctaccgctgccgcaccctaccaccaatggcggcgcctccggccacggcctccgcgccctccctgcgcccgtccgcggccagcccacgcgccgccgccgctcggtcggtcgccgtcccctcagggcctcgcaccgtcggcccgaggcgagacgggggccgcttcctcggcgtccgtgctgccaaggtgagcgcgagtggattgctcctgctgctttagcttcgccggcggggccttgttacctacctatcgtttgggaggagtgtactgattggtatatctggcttttgtgctttcccgtgaagccttcgccatagttttagtcccgttgtattgcaagactgaatccgtcatacaccatcaacagcttcgtctgtcgatggttgttttatccgcgcgaaaattgagttgttttgtgttgtcttccgtgtgcaggctgtcagtggcgtgcagagtggtaccgtggtggatgatggaggtgagtcaggttgccttttcgctagctgattcgaatcgctctagttttgcagtcgcagcgcggaatacgtgctcagggttctgctacggatttgcgattaggcaattgtgctccacagttaagaagatgatgaatactgtttcaccatttttggattcttcgtgcagtgcaaagaccatggaagctcagcgatgctcggctcgttcttgaggatggttcagtttggaaggccaagtcttttggtgcttcaggaacacaagttggtgaagtggtatttaatacatctttgacagggtaaatcaactaaccgtttgagtgatggcatttgtttcctgttgtggttgagatgtgcttattgttcttcctgatagagaaacaactaacctcatcaaatagttgagacgcgcgtactgcttattgacaacaggaaacaactaacctcatcaaatgggctgcaggtatcaagagattttgactgatccaagctatgctggtcaatttgtcctcatgaccaacccacatattggaaacactggtgttaatcctggtccgtatcttttctattagtcaataatcatgatatgatgccatttccacaatagcttgtaagttttaacaaattagaatgctcatgcagatgatgaagaatcgaaccgatgtttccttgctggtctgatcataaggaatctaagcatatggtaaaccattttttcctagtattggttgacataattggaactttaagagaaccacctaatgttgttaaattggtattctttctctgtagtacatccaactggcgatgcacagaaacacttgaagagtatctgatgaagagaaacattatgggaatatgtaagtattgtcacctgatacattgctctctatgtccgacaaacaacaaaagcaacaataaacaccatcaatttgctttatatgcagatgatgtggacacacgcgccataacacggagattacgagaagatggtagtctaattggtgtcttaagtactgatcaatctcggaccgatgatgagttgttggaaatggcaaaaaattggaaaattgttggtatgctatgctctcttcaagcagtaatgtccttgaataattgtctgtctcctttaataaatataattgcactttgcatggtagattgtaacatgtttctctttacgccaggtttagcacatatttctatttacaccaggtgcatcgaaataagtttcgcttaacaccaggatacatcatcaaacatatagaaatttcatgaaatctaaatgaaacttcatgaaacatggtctaaattaaaaaaaaaacgttttgataagatttgacaagatttcccttcagttatatgaagcaacctagtgcaaaatgaaacttattcgatctactctggtttaaagtgaaagtgtgtgctgaactcagtgcaaagtgataattctacctggtgaacagtgcaatttactcttaagtcttaaaaaataattaattaccttgcaaacatgatagtactaggcttaatgaaattaacgtggactatttattatttaaccgcgtactggttcaggaatattattatgttttgctggtcaagcagattgttaactcgattgaagtttcatatgtttatgacatggacacatggttatgatgcttgctatccttcactgatctattagagtaactatctggagtatttttcatgtccactttatgatgaatattgtgtcaccagcattgacatgtaatgatatcatttagaatagtgtattggcaaaattgattgcctccatccatatttagacactattcaagttactggttataaaacaagatctggtatttcatgttatgcaggtgttgatttgattagtggtgtcacatgcgatgctccatatgaatggtcagacaagactgattcagagtgggaattcaagaagggtcaatcgactgaaagttttcatgtcagtgttggtttggtccctttctcttttttgaaacacttcagatgaatctcatatctaaacattagcttccttttatttaggtggtcgcatacgattttggaatcaagcacaatattttgagacgtttgacgtcatatggatgcaagataactgttgttccagccaattggcctgcttctgaggtacttaacttgaagcctgatggtgtgttttttagcaatggtcctggagatccagctgcagttccatatgctgtgaagacagtacaagaaataatagggaaggttcctgtgtttggcatctgtatgggccaccaattgattgggcaagctcttggtgggaagacatttaaaatgaagtttggtcatcatggaggaaatcatcctgtttgtgaccttcgaagtggacgtgtcgacataagtgcacaagtttgttcctgacctgacttcttactgttttgatactgaatgcgattcatgttttttgactctcgagggaaatagccttccgtttgaatttcagtacaataaactgttttgtctaactagaggtatagaaacttgttgtaggattgctgttttaagtttttaagtctagaaaccattgatatccattatagttcttttctgttacgtattgatttatagatctatcctatgttatttcctgaaaggctttccgtattactggtgttgggagaggtgctggacttctcgctgtgacacttcctgatgaaaacttggagcttctgagagtaatgaatttgaacctttaggctgttaggtatatccaatttaatcaactactccctccgtttcacaatgtaagtcatcctagcatttcccatattcatattgatgttaatgaatctagtcacatatatttatctagattcattaacatcaatatgaatgtgggaaatgctagaatgacttacattgtgaaacggaggaagtagcaagtctatccttctagactaaaatcatatacaccaaatcagctgagagtcaggtagtattgtttgtaactctgtattattagaagttgtttttccaccaagagaaatgtgtgcatccttgctattttccttttatttaattcatatttctgagtcttagctattttcccctttgttttacttgtcatacttgcatttactactgtgcaatctgcaattgtcttaccgtatttttctctgcagaaccataattatgctgttgacccagagtcacttccagaaggggtgaaagtaacacatatcaatctcaacgataatagctgtgccggccttcagtaccctaagatgaaacttttgtctcttcagtaccatccagagtcctcacccgggccgcatgattctgacttgggtacatttccttgaacaatatagtacttctagagaaaagtgttgtaccaacacaacttgtgttatcactgttaagtgttgattttactaatcctgtttcttgtgctttacagcttttggtgaatttatagagatgatgaagaacaacagattgtgaggcgcaaatataagatacaagggtttggttcttgaaccgggaggtgagaggttctatttcagatttctgatgagagccacaagagtcaaaataatctgttgtacctgtagcttttctttccttattataagctccgacaagcttgaatgcgagggtcaaggactcgagaataagttgctttgtgactgaatcagcctatgcaaaaatattttactcctcagtcctcaggcttcctgtatttccatcctttacattcctatgccttgtaaaagctgcgatgcatatgggcttggagtgcaacagggatgccctcatgcccccatcttatcaattccactaaaacaatctacagacgccacaaatccctgtcgcccaagtagaaaccaattagtggtctttggcatttgcactattgagggtgtgtttagttcacaccaaaattaaaagtttgattgaaattggaataatgtgatgaaaaaattggaagtttatgtgtataggaaagtcttgatgtgatagaaaaattaaaagtttgaagaaataatttggaactaaactcggcctgaatataaaaaaggggtcaggagatcactatggcaaatcattggaatattttttttctcccaggctagtaagctaggttgctgatttgccatagatatgcttaacgttgttgtcgactttttatttcctgatagaaaaactttcgtgctatccgatggggacaacttctgtgaagatcttttgatgtgcgtgcatgagagcttttttcgtttatccaaaatgcaccgctagatgcttgctctgacccagttgacggtgcagagaggaggagaaaaagggttaggattttccatcgctgatggccggtggtccgggccattggttggtcctagggatttgggggagaatctgttctgaataaacatgtagggtccatgtgtctatctaccacgattttcggctatctttggctatttgcatctagtcgggtaatagcaaaggaatctgcatttttgatggcctgagatcataggcccatcacatccaacgtaaagaaatgtcagcggagttcatgggaatctgccctttcggagaatgcaaacaaatattttcggaattttgtttagtgtgggagcgctcagaattatttgatggaactgagtttacatgctcattcatattggaatattacgggagttatttataaaatttaaaatggagtaaagtgaattcatagcggaaagatttccaagacagttttaggaagggcaaacaaacattttcctggttaaaaaaaaagcttctatatacttttagaggacacacatcagagcgggtgtctttctattgaggtacagttcgaaaagagtaacaaatacaacagaccagacgcaaaaaatggtaagctgttatagattacacatttttgttgagcattgagctgtcctgggaaaattttgccctgtctccacctgcatacagcctactattgtggagcaaacaattaatgaatacgatcattctggaaaaagctcagttgcacatgttcatgaatgcatatatattcatatccaactcatcaatggcatatattcggattgatatgatcgcatcgcaaataatgaatgagtaccataaattacttattttatgggttgttaaattttgtatctaaaatgtgtttgcacttctaattaggcacgtgaattaatgagattggtatataaataaggaaaaaagtgatagttttaataagtttcttctctttgatgttatactttttctggtgatatgagaatttagaagttttctggaaggcaaaccctattgagaaattgatagttccagatgcaaacgagctatataactaccatcccttaagggggctattcggtgatatgacctgtttgtgcacatgttctctaaacatagtattacaactaatggggtgtttgggagagaggggctaaactttatatagggagctgtagatggtaaaatggactagcagtatatggtactttctccggctcctagtgtcaaatatacttgatcagagggagtaatcaccgactgtaacaactaaaattgagagcccaagatatcttttttctcttttcctttttccagtttgacatttaacttgttttataactcttgacaatttgactaaaatattggatgttgttttgttttggctcagatttttttataacattctagaatgtatgatgtgaatgtgttattgttgtagtataaaaatgataaacacaatatcaatgttaaacatgtgattcatgaattacttttaattgaaaacaaaagatgcataaaggactgctaaggggaaaaatgtgtagataaccatgttacatcagatgagagaagagttgaggtagactttggaacctattgtcttctctttggtggggtgttctttcttttttccccgaacacgcaaaacctttgcgcatcgtctattcgggctgttctttgattgatgcttttttaaggtctcatgtatttaattatcatatctttcaatttagatgtacttctttttatagcttttgtgtattagaagattatctttatttgttcaacaaatgtgcacatgcctaattaccttttccttaaaatccacaatgacgtaatgcatgtctagtgagcaggcgatgactcttatgatttatatccgttcttcgtacgctcttcacttttcttagcaaaaacccaaacgttgagacaacatattaatttgactataatttatggtacatgactcgtcatttttggccaatatatcttacggagtctacatgatagtttattaccttaatatgcatgaacatgatctcatgtatcacagaaaatgttaagtctaattcacctatgtgacaagactatatacaattcatacatacaaaagcatgcaaaagaggctttctattacgcccactgtatgacatgttagctactcttaaaccaaattctacttttagtatatatacacaatataaaattgttagtccgatctatttttgtgacaatatttttacataattcgtacatgaaaaatacgcaaagagacattttgttacgcctagatatgtcgtgttacatgctttttaaccaaaccccgtgtccaatatacacagtcatattctaccaatgcgataaaactttacacgattcgtgcaaatacaaaatacgagaaaagatacctctatattatacctaacacatgtcacggttaaactggagtacgttttcagccaaactccccgaggactacctttttagccaaactctgcgttcaaaatacgcatagaaatacgtgcaaaatactacagctgccaccccctgcatttggcgtacatgatcaaagcttgtaggagtagcagtagtagtcctatataaaaccgggagagggaggccgatggtgatggccccaccgttttaaccttgattcatctcctagtttccactgatctccagcgctttttggatcgacggcgacgccgccctctccatctccagagagagccctcttctccgtttcttcctactaggctactactactcctcctcggctcaaccctcccgtcccctcacccccacgcgcgccgccttctccccagaacgcgccgcggcgaagcgccgccgaagcagcccccactcctccgcgcgcggcggcggcggcgcagtctccagacgcttcctcctccggggatctcggtatggctgactactgggttttttttttcctttttcgcgattcctccccctgattaatctgctgcgattccgtacaattctgccgcgccctgttgcatatagattactcgcgcgggggggtttggttggttgggaggtggttttgttaatctgtttgagagttgagttgctagtggatgattcgtgtgcggttttagcattggcgggggcgcctctgctctcgctctctctctctcgcgcggcggcggaggaagcctcgcttcctcgcggggcgcggtggagtgtgacggcctcgaccactgcttccggaaatcagtcgcagccttctcccctgtgtgcgcggcgtgctcgcgcgcacggccggtgacggcgaggggagcaggtttgtaggagcacgcgggccggggcggcgttcatgtaaggttggaatcgaactgaatgtgttcggtttttctcgtagtcatcactccgccgcctccgcgccacgttaggtcggttccatgggtttcagttgtgtagtgcgatccatgtggtacacggaagagccaatcccttgtagatgcaggatccataccctgtttgttgtctggttttcctcccatgattgaatttagtgggaacaagtaggatcgttaagaaattctactactacctcgacagatggtgttgcattcgtacacgtttttactgtgttctactatggtggtgactggacttcagtttagaatgttgttatattcttgatagttaaggttaatgattgtaagtcactgtgttttcttgaattcagcctttgaatggaccgaagtgattccatggctgattcgccaaggaggcgtaatggccttctgcgggaccaggtccagttggtgaaaaggaaggacacaaatcgctacgaaatcgtccgctttcctgatccattgtcatttgagaaaggcttctttgttatgatccgtgcctgccagcttctggtgcagcacaatgaagggatgatttttgttggcgttgctggaccctctggggccgggaagactgtgtttactgagaaggtgctcaatttcatgcccggtgttgctgtgatatcaatggataactacaatgatgcaagtcgcatagttgatggcaattttgatggtaacccctaagttccaagcacttcgcatactatcttatcatcccgtaatttggacagaacttcctttacatttgaaagatttccttaataagcacagaacaatactttgcatacatctgaatgcattatcttatagttacttcttgcatctgcatatgtatgccctgataatagtatgattgttgtacgtgccttatgatataatcgaagtattagtgagtttgattgcttggagctgcattcaattgggagcggcagtggtgctaactaactacttaactgagttagtgatgtctgatctttgtgacatttgaacagatccacgcctaacagactacgacacactgttggaaaatattcatggtctgaaggagggaagatcagttcaggttccaatatatgatttcaagatgagctgccggactggatacaggtagtttgtccttaaataataattcccagtttgtcactttttagtattgtaaatatatggtcatatgtctttatgttatcttttcttatggcaaacagaacagttgatgtccctagctctaggattgttatcattgaaggcatctatgcattgagtgaaaagttacgatctgtattggacctacgtgtttctgtcactggtggtgttcattttgacctggtgaagagggtcctgagggacatacagagagctggccaggagcctgaggaaataattcatcagatatctgaaacggttgcttcacctttttgaacttgaccctatatatgcctttcccctatcttttgtttccacaaaagatcttaatacaaaccaaacattcatttcgcaatttatattttgtatgtatagtatctttttcatccatctgtgttgtttaacaagatgaacgatggcatttttcaggtttatccgatgtataaggctttcattgagccagacttgcagacagcacatataaaaataatcaacaagttcaacccattctcagggttccaaaatcctatgtacattctaaaggtaagcactccttatttatgttccttttagtgtccatgttttggcaagatggctgatcattgatctcttcaccaatagcataattttaatactaataaatacttgtcttgtggtttatctagatggcctaacttttggaaatgtactcttgcagtctccacgaactataacacctactgacatcaaagttgctcttggtgaagatcatacagaaagcattgaagaaacttatgatatatatttgcttcctccaggcgaagatccagaatcatgccaatcttatttgagaatgaggaatagggaagggaaatataatctgatgtttgaggtatgcaatttattgcaatggctacataagtgcatatgtgtgatggatatagttggttgttttgttacaagaattacctctctggcccattattttatatccactttgttagttgttccctagtgccatgctcataggttccagaaatatgcatcttattcctactagaatattttcacaacagttgcacctgtagctcataaaacaaaaaaaattaattgcataacgagcatagtaagggaaagatcagctgagtcttaattgtatttgcattcactagcagctttgtaactgccgtgtttttggcaattttgtctgctgacttatggtgttctctaccacagcagttagctacttagcttagatatatactcctttgctataccttattatcatatcgtatttgcaataattttgaaatttgtgttcactaacttgtgttattgataatttgaaggagtgggtgaccgataatccttttatcatatcaccaaggattacgtttgaagtcagtgttcgtcttcttggaggtttgatggcattgggatatactatagcagctatactgaagagaaagagtcgtgtgttttctgatggcaaggcaactgttaaaattgattggttggagcaacttaaccgaaattatatacaggtaagaacactcttgctatttgattgcagttctctttcaacatgatctttctctgtgcacatcttgactgatactctagttattattatttgtatctatccacttgttaacaagatgcataaaatattatgttgctttttcttaggtgcaaggaagagatagaaatcatgtcaaatttgtagcggagaagttaggtctggatggctcttatattccacgcacatatattgaacaaattcagctggagaaactgataaacgatgttatggtatgtatttgataattatatatatacacacttctcaccttattactagagcactagttgtatttcttagttttggggtggtttcaaataagtttacatgcaggcattaccagaagatctcaagacaaagctcagcattgatgatgagctggtttcaagtccaaaagaggccctttctcgggtttctgctgataagagaaacaaacacctgaaaaggtttcttcatgtcatctctgctcaaaatttattttttgtgaaatgctatactttgttgaaaccatggaaactgaatcaagctcgctgatgttaccttgtggattctgtgcagtggtctatctcattcatattcaactcatggagataaaaatattgtgaaattgagtaaattgacagaaaccaacagaaggtttggaagtgggcgagcccctgaacctcctgcaattaatcaggtggtcattctagaatacttgtattagttatagctaccatactaattaaaacatttttttcttgtgaaaaacttgacatagataacactgactcaaaattcctccttgtttgctgctgcttgtagggtgctatcactcagctatccgaacagatttcaacgttgaatgagaggatggacgagttcacctctcgagttgaagaactcaactgtaaatttgcaataaagaaatcatcgaccagtcagcaaaatttagctcttccaaatgaaacttgcaatggttctgcacctacaaatctctttgtttctcatttgggcaatggtaccctgatacctcattcgtcatcatcgaaccaacttttgaaggagtcccccattgtggatgaggtatttgccttactgttattataatcttatacatgaggtgttgtccccccacttttccacttggatttgtgggtttgttgaaattaagtcatacttaaggtaaaattgcatcatctgataatataatcttcgctagtctgtgttacagccatgtgtttagttgcattctcccaaaccatttcaccttaatcattgactaaaactatggcttggtcatctgcagaaaggccaacagtattttttttcaaaagaatttctgatgccagaaccagattcggtcatcaaacttgaaatctcaccaatagattggttatgatgggtccatttttttgctattattttcgagacacttttcagattttgtttgaaatttagatgtagaattggaaactttgtacaagtcactgtattaatttagtcagtattcaaataagtgaatttagactgaagtgaaaatttagtgggccatcagctactggtactattgtttgagaggagaaacaatagatagagaatagaatcatggtagtagtcagttagactcacatgaaaatagataaacagggaagtgtatggaacttaagtttatcttccaatcatataggaagaaaatcagcttctgtagtttatgcagtgaaataatgtatccataaaaaacagtggagttgtaacagttgatcttggcatgttgcatcgggcctagattgctaactatacatacttctatgctccaaattttttggcttcacaaaaatgttgtgatgtgatttgaaccatttttatttgctgacagaaaggctgtgaaagcttttttttcagtggcatgttttttaagatattgtactgtataatgtctcgaagattttatattcccgatgtatttaatttatgttacttatgtcaaaatcatattccaaaaaaaaaactctgtgttctgatgaatttgtttttttcctgttaaaatcatatttcaaaacaaagaacacttcatacatgattgctgactactacctatttttctagatatgactcatctttctgtatgaatcttgacatttattttggtggactttctgtttccttcgcagattaatgccatatcaagaggtcagcgccaagtgatacatcagcttgacaatctgaccagcttgcttcatgagcatttggccttgacccgccaaggaaatgcagtccgcagaaacgggatcctggaaatggacatgtccatctgcccactcattgccctgacaattggcggtttcggctatttggtgttcaagagcctcaaccggagctaaccgaagcgaatcaggcagcgacatgctgctttaaaaagctcaccaccaagttcaaccaagaaccagagaaagccaagaagtctcaaaacggatcttcattcttcagtactcagtccagacaccaaaccgatgttctcctgcgagctatagacggtcctcactcagatcattggtctcatggggaccatatctgatagattttacaatttcaagatagataaactcatataccagcacaagcaacagagcagtcttgatactcgggccaagttacttggaagcttaaaaactgtgtactaaagagcgtagagttatacaatatcgtctgtaatggatactggaaagcccccagtatcaataaattttggagacgctagtaatcccgatataatgtcgaacaagtcgtgggaaaagagcatagtcattttactggaattgctgttgtcttctttgtcacctgtgtgtgggaatgcctagtgatatttagcaagtcagctctgctgtcagcgtacagttggatcttgattttgcacctcgtcatgctatcgtctgaactttgacgtcacgccgttggtccaacctcacatggtcacacgtgaatcagcgattattatcgttctcgtctgcctcaggatatttggcaattgtgaactaccacgggtaacaatataattatatttttgtaatatttttaacaaagtatgatcaaaatatcactcaaaaaataaattactcccctgttttaaattacgtgttttaggtttgtcctaagtcaaatatgcatatctttgaccattagtttataaaaatccgtgtagttcaacaacacgtgaattataattcataaaagtatttctcatggtcaatctgaaaatataatataaatctaataatgctaagctaaatgagtttgtagaaattgatggtcaaatattcaaatggttgacttatgaaaaatctagaacgagataagtaatttgaaactgagtgaatagaagttagaatataagaaacacaaattttccatattctcatcaactagctactactccctccgtttcacgttataagacgttttgactttggttaaagacaaattgtttaagtttgactaagcttatagataaatatagtaatatttataacactaaattagtttgagcaaaacaataattaaatatattttgataataaatttgtcttgtgttgaaaatgttactacttttttctacaaacttggtcaacttaaagcagtttaactttgactaaatcaaaacgtcttataacctgaaacgaagggagtactcactaggtgattcaaataatcctccccaaataggccttggtgtgatatttaaaataaatttactctctcacacatgacacatgcaccaaaaagaattaagagaaaaactgtatcttcagcaagaacccaagcatggcccgttaatactttgggcttttgatggcccgttaatactgtacctacaagggcttggactgaggcctttattagactctgcgccgccgcctcctcttttctattttacctctcgtctctctcctcgcggtcgcttctcgtctcgtcccaatctactcctcctcctcgcgctcccctcccaccctagggttcgccatggacaagggcgacgtcgccgtggccgtgcccccctccatcgccggcgcctcctcctccggggccaagaagggcaagcgcttcgagatcaagaagtggaacgctgtctccctctgggcctggggtaagcgtccgcgtccgcgtccgccgatggcgcccgcgtctcgcttgttggctttctcgtgtgcgatctgatgcgattccgtcgcggttttcttcttcttcttcttctcgtgcagacatcgtcgtggacaactgcgccatctgccgcaaccacatcatggacctctgtgagcacgcgcgccgctggccttccgctcgcccccgctccgatctgctgttcctttagattctagggtttcttcttagcttgttggtatggcttgtgatgacgcgggtgcgcgtgcgtgtgttgtgtaggcatcgagtgccaggcgaaccaggcgagcgccaccagcgaggagtgcaccgtcgcttggggtaacattgcttcttcttaatctcccgttaattctaattctgtgccgatgcagcagtagatgtaagtgctgattcagccatgaattgcatggtttcagttagctgaagccggtcttgccctgtttattctgaatttagttttgactttgatttcatagttcgattgagtcaaattaatccatgtgtcaacctgttactgtgctctcagtacacgtcgccttgtgttgtttgtcattggtttgctcatttgataatgatttatcagaatctggggatcgtgctttcccaagactggttatatgctgctaggaatgtttttctctcgaatttcataaaatcctaacatctgttttgctatacgctattttgaatccttcgttctggaattgaggaatgcttctagttttcatgctctggagtattggtgaattgagttgtagtttaatggatcctgcattatctgccgcctctatgtcatttattggtaccagagcatgatttttaatatcgtgtataatatcatttgttgctgatcatgtgatttgcaataccatgttattattagtgattctgataattgcaagttcttgtgatctggagtagttttgactggacatgtatcaaatgagtgcaatgtgattatcttttctattcttttatatgtactggttatattcatagttggaaatttgtactataattatgcatggtttgctatattggtttgtctcttggttttttatctaagtctataattatataatatgtcgcagttagctttggacgtgacatggcccttgtagaatatgttgaatttatctttcataaagaagtatgtagttatgataggataattgaatggctactggctaggagtaccttcttctggattaaccatctactgttcaattataattataccttgaactatgcacacatgaaactcaaatatgataatacagttcatgtctgggtttcctagttcctatgatttgtcaaagagaatcactggaatgtgggttggggagggtgggtgagtgttcatgttagctgtgtcaattgatggaagtgaattcttgcatctggaactagttgaagttagtggtgtatattttcatcaaaggcttttagctacaattgctttatatatttgtatgagattcttgtgtgtggatcttccttggctacccggcatgttaatatgttcttcttctgcccacagtttaatctactttgactgatcttatgtttacagcatgttgttgtttagggatatgtacacttgcaccttctgtgtgccctctggattatatgttcaagtattgttttgaattaaacaatactgacttgcacagtcaaatgctatgttcaatatatttataatactgaagtttctctcctgggggagtattatggaactttgttttctttccgtgtaactggattcttctcgtctttttgtgttgcttttagtggatattgcattttcgcagtgaattaaatcgagctgtgaagtcaactatccatgtactgatgaacaatctatctttgttgtgtcaggagtttgcaaccatgcattccacttccactgcatcagccgttggctcaagacccgtcaagtgtgccctctaggttggttgccctggaaaatgccacttaattggtgtggttgttacctctgctcgttcaccgtgccttacttttctattttatctatgcagacaacagcgagtgggagttccagaagtatggtcactagacaattctctttcgggagcaaaagcggcttcaagtttctcgtatcaagtattagcactaagtgataactaatgattacgatgggtaggctgcattgttaatgtttcagaagcttgtattttcggtagaaacatatcatgctggtagctcagcgaatctcctcaaacttattttcgctgaaatcaagcagcagttcgtatttactaagtttttttctgctcatgatgttccagcggtataactttttgcacagatcttttgggtactactgctactgttttttccaactcatatgcgtctaagcctcttatccaacttcagcttcacatatcaaatcatccaattgatggctcacactttcgtagctggtagcttttgcaaacagaaatcttacaatcaaaattgaaccgtaatatgcctgtacaatttattatgcatgatatctgctgcaatatcaaccaaccaagctgttcagtctcacactgtctacaatataaagttataaaagctcagctgcgtatagcatggaagcagcgctttacttcccaagcacggtgaagagccatgagcagggaacaagtggtagcgaatcatactttgcaactttacaacaattaatcagaacatttgacatttctagattctcaaaacaaatcctattttcaattacccctctcaccaaatctgaaaaaagaaaaacagcccaatttgatacaccttagcgtcatgcttgcatcaagcttctcctcgcaaagcagtgtgtgcctcatgctgcaactgtacctctcttcgtgacagtatatgggttggtctcgagcagattctccagggattttgccttcctgcttctcccccgaccagcctccttgagtagctctgcaagcctccgcttttcgtcatcgacgtctgggttagctgtgcccagcttctcttcgcgcatcccaactacatgttccaagatctcaatggcctcatccagcctggataacataggaaagcaggtacaccaacatgttattctaagaaacaaatcaaaaaccttttcgcattgagcaaacaagctgatgtgaaatacattttttttccctttagatactcattagtagtttttaagaagtatctcagaaagattgctatgcctcttcagaattctgatctagccaattaaactagggtgttagttcttatcaagaagccagctgtattggtaggtcaaaacttgcatcataattataaagaatattataaagctgacaatccacatgacatacaaagtagcatgaagtttccacacggacaattgaaagcaaatgggcaggataaagcaagaggataaagtatttgcaactcttcttttacagagcagctggctacatgcaattaaagattgtcttaatatggtcctacttcaattaaattgatcccactttataacaaccaatatcagctcaattcaattgaagctgcaaaaggctgcacaaagagaccaatcatgtccaagctggaagatgcaaattgcgaacgacaaacataaaagaattggcactcataagagtctacacaccgctactgtctccagggcataaagagcaccaatatactgtgtgaatggtcacatggagcagttatcagtgccatagttgagaacaaaccatattgatttccatgttcacattgtgataaatcatcgaggatattaagataaactgtaccagggaccctttgcttttgtaaattttaattggaaaaaaaatattatctagatggctggtgataattagatgtctaacagaacaaaagtcagatgaaaagctagcagttaatttgccgaagtccaagatatactgcgagatgaggaagatgtccatattcacagctttgctaccgatgtaagagtctattaaccgtaaaaaataaaaaactgatcaagaatcaatacggagcttaccttcccatggcatcataagttccagcaagattgctgtacactcctaaagtatctggatgataaggtccatattcttgctccagaacagctctagcttcctcaaacagttctgcagcttcatttatcgagtatctttgaacacatgccaaccccatctggttcagggcaacaccaaagaaggccgtctttttctcaccacaagtgcggagctttgcaatcgcactcttgaatgagtcataagcttctccatagttccccaaaatatagtgcaagacgcccatctgagcctcaattccagcaattgtgctctgttgaccggcagaattgttgtacatttttaaggccttctggagtaacttgagtgcttgctcatgctcattcatggtttcataaatggctgaaacatcagttaaaccggtagcaatttcttccaatgaagttcctggaataggtttctgataaattttaagggcattttcacagtatgattttgactccctcagcttccctgtcttgttgtatagatccgcaagccgcacaaaaacagaggccaccgttgcatgattctcccctttgctagtcttgaatacagtaagagctttctgataagaaaacacggcctcatcataccggcccaaggagagataaatgtcaccaatgctgcaatctactgatgctacctcagtttcctggccattggccaccatggccatgctagccatcaccagatgctctaaggcagcttcatgatcaccctttgtgtcacagataagacccatcagcctcctatcagctgtttcttctaatgaggctggctcaccattctccctgtggatatcaagagccttctggcacaatctttgtgcttcatcaagttgtaatgcctgcacatgagcttcagccaagtaccgacaagtctctccaactcttggatcctgctcccccaatgtctgcttctgaatttcaagccctgcggcataccattgcagtgatagcgcagtctggcctagcatcccataggtgtcccccaattgcatgcacccagagaacttcgcaagagcatgctcctgaccttcttcaattacagggatctcaagggagcgctgtagtacaggtacagcctcgtcatactttcccaagttgcagtagattgctgccacaacatgcaaactcattaccaagttcaagctcggttttccaccagcacatttctcgaatgacttggtggcacgaagagcatatttcagtgcccgacgaggattatcggaggcaatcaaatctctcgcatgcttaagaagaaatggaccaaggtctggattattaagcccagcatcttcagtcccattgtgtggattaggactagctttccgtcgacggccaactcggcttccgggtttgctgacctcggcctcaccttcctcggtggatgccttgccattaggaccaacagaagactcagattcaagctgtgatttcgcagcctttttcgacgacttcttcgatgaattcgaagacatcgccttgacgggagtcccattctcagctgcggttaccgcattagcggcattaccactcccttccccttcctcctcctcaattaccttcatggcctccatctccccagcaacaaggtggcgaagctccgagtcgatcctcgattcctccccgtcggagccgaagctctcccgcgagggggatccaccctcgcttgagctctccatctcgcacacattgttgtagagctgctcaatcgatggctccccggcgccggaaccctccacatgcatctccagcgcctcgctgtgcatgcttttcgaagccaccggcgatcttggggcggacgaattgtccttgttctgcgaggagttcacctcgttttgtgcctcctctgtgacaactccatccacgataattccaggcattttgcgggagaattgtaccaagatctttcagctcaagccccccaatttctcctggaaacaaaccgctactactatcagcgaagcacaaacgcatcgaaagaaagaaatcccgaagaaacatggcgggtcaaattggagggaaagaaaccaatccccggatggatctccaatctacagcgtgtcccatcaagaaatggcgcgggaaagggagggaccacggatggaacaacgcgtaccttcaagctcgatccgagccggagatgccggccgcgctcgcgcgcgaggaggaggcctgcggctcaatggctccggcttttcctctcgacgccacgcgctctcctctcctctcgtcttcctcttcctctcgatttgcagccgcgaggagagagagagaggggggaggggaggggaggaggacgaagcgtaattaagagctccgtatttatttacgtgtcgcgtgcctcgtgactgtcactcgactggggcgggccgtgaaaatgtactagtagttccattattaagcgtttcttaatccattcgtggctaatcagcatccttaatgattgtatattagtgcaaatgaccgccgctaagccacaagggtaacatggtcattttctcttaaagctatgtttaagcgcaaagtatagaacaaaaaaattcaaagctactggcaaataaataacgagcactgctatgcacacgataaaatcttttacaatcaacgtattttcgtggtccaattgtacgcacgcaagataggattgtaataaaatcgtatcaattttatcgtacgcataacaattttcaataaatgatactacagaattgcataatgtgtttaaacgatatggcatatgcataacacattgacaggcataataatccgatgggcaccaacgaaccgaacgatcgaccgatgtgtcaacaaaaataacggtcttattcagtttgagcgacgtgtgtttttctctcttggggttgcaggttaatttggtttcgcggttttgctgggttgggttggtgagctgaagccgtcaccgccgagctcgcgaaaacgcttgtcgttgaaattggacgtcgcatctgctggcaacatatatccaccaccgcatttcgagctcgatcgatcgatcgatcgctggttggtttgttccgtctaacgaaaagtagggaacggatgaaccacaggcagagagacagacaaggaaagaatgcgaacccactcggtatcatactactatcattcccatcagtgattaatttgttctaagtacgtccataatgtggcttaatccctacagggtttgcaatctcggtacaagaaattgagaattttggacccccccctagcacgaaacaacgaaactatttcatcagaaaacttgatttttatttttcatttttttgttaatttagaaaaaatattttaattaggtaaaaaaaagtgccaaaatgaaatatattttttttcgttttggagtaccccctcttttttttaaaaaaaaaaatcggcttcctgtagatttgtgctctccgagattgtaaacccttgaccgacatgctgcttcattttgcagcacagctcttatacttaaaacaaatacctttgccatgattgcaagatcttttcatcgatatgttattgcccttttctttctcatctctgtctctacatctgttattcctcttaaaaagaggagaagaggcttttgtctctgctgtttctcggttgttagccggagagaagaaggggcacagcagtaggccagagtggacgattggttggcaagacagcgatggaacggcagaaacgaaggttgccatgttgcaattaacaaacaaacaaaaggcatcatccgcaacgcaaattgtggatttttgtagggaggaggaggaggagaacgtttcagggtaggcaagacttgctcatcaccggcaggccggcgagctatagcttatcttttcctattggatgggttcacctgaaccacctcgagaacgtctcgtttctccagtcacgatagagttcgtggtggctggtcaattcttcgattagtgcgtttttttaattttaatgggggtgtgattaagctattgacatgttgctggagacagacagtgttaagtaaggcgagagagatgtagtagtagtatatgatctgtggccgtgctgtaccggcagcagtagcagtagtatcggcgcgcgatagtttcgcatgcgcagctgggatcgtgacacggtcggttgtcgcgatgccgtgacagccgcgtcgcttcatttgttttctcgtcatccaccgtacatcggcaacgaatagaaaacacatatactattggtcacgaccgttaaactgggtaaagctcggttggcatgttataatttcgaatctggatcatctgtagtgattgcaactgagcggtagtagcgggtaccattgaatgtaaatcggacagtctagattgtacactgttctagccatagcgatgtacttcctccgtttcacaatgtaagtcattctagcatttcacacgttcatatatatgtctacatttgttaatatcgatatgaatttagaaaatgctaaaatgacttacattgtgaaatagagggagtaataatagcgaaatactatagcatgggagcactgatcacaggtttacggtagcgttgaatctgaaccattaaccataaaacatacggctataattatataccgtcgttaacttgcagttacacgtataactgcacctaatctgaattccatccactcctgtatgcaaaaggaggtaaagatctcacactcgagcaactttgatcgtactttagctgattaacagcagacaggaacgaacgggatcagctcaaacatcttggctgaaaaaccaggttggtccttacctgacgaaggaatcctctctgttccaaagcaacagcgcttagcttccgtcttccgctacgcgtgcgcaccagcggacacacacattctactcccggtggaggcggccgcgggaagctgggccacgcacgggcgcccgcgcgtgaaacgaggccggatcacgggatacttgccgcccgcgaccgtttaagttgggccgcgccgccgccgtctcgtctcgtccggcccaaacagccgagcggcccacatggcgacacacggtgcgctcgcaggagcatatgcgtgggattcgcggcccgggccggtgaacccggtgaaaatttctaattcccccaatatattttttttctctctcccatttcccatttactgcggggaatcgcgcacgctgcctgcctgcccacctcctcctccccccatctccctcccctcacgtcgcaggccgagccaggccacgccgcaaacccttcttcctccgtcgccaccgcccaccgcccaccgccacctccacctcctctcgccgccgccgccgccgcccgacttccccgctcgacgccgtacgctgctgggccccacccaccgtcgaccccccctcggtgcgcgagcgctccggtcggcctgcgcccgccaacggcgtccgtggactgctgcacccgccgccgcctcccccgctgcttacgcgggcgcctcgccgcggagggtgaatgagtaaatctctcgcttctcctcctctccctctctctctctctctctctctctctctctcgcaggatcggttacgttccgcgctgttttggggggtttgggtcgctgggcgcactaatacgtttagggatcttagtttcatcgaccaaacgcccgaggaagcggtggttgctgtggtgagggtcgtacgggcgcttgaattcccagtgtatttttttcctctgccgcgagaacctgcctgcacattgaaacaagccgttagggttttgatgagttgggtagagttaatgctgccgacccgccctgcaacaatgcccacgtattcgcaccgattttacacgtttaaccaactcctcatatttccgatgtgattttgcttcatctgtttttgtgaaaattaggggactgggatttcatgccatatagttcaaacccaagcattgtttcctctgttaagttcatattgtggtgctatggttctcattgttaaactttccagaggaatgtgccatatctttgtactagtctaactattagtgcattatcatttgattgcatgtattcctgattcctgaatacctttactgtaatatgttttttttattacgtactgtaaacaattgcagtgctatttgttattatggtgtctatccactttaccttctactgtccggtagagcaagttttgttcagggcaaactcttaatagtttatggatcctaagaaattaggatgagaaacaaaaccaaataaatgtatcgatgcatatatagtacagtgggcaatccacatattcatattacccatattatctttaatgataaggggaaattccttattttccattggaaaatctcttggtctcttatatgccatcagccaacccttgtttcactgacatgtggagtgatggcatcaaggggattcgggaattttgcagtggaatgcaatatttcttttaattactgcaccgtctttgacattttgtttaaattacaggtctggtttgatctattccagtttgttttgtttgttgtcccacacttctgttgtacaatgtacatactataaacaacaccttttttttttcttctaggtgttgaataagtcactagtgtttatggacttcaaaccagcaggagattgttctttcagtgctcacgctagtcctgccttatttcatagtggattggcagatcataacataccaaagaaatgctgatggaccctcctgttatgcaagtagattgccaattacagaatgatttggagaaaacaacacctattacctacaatatgacacatgccttgtcacatgatgatcatgggtggcaaggttctgatgctcatcctgcaagtgagacagttagctgcaagcctgttgaagttaacaattgttctcgaacaagcatatatgagaacctggatggttcttctgaaaagtctcatgctaacttgtcagatttacctcagaagatgcatgccgagcccccaaaagagatgaatggttctgatgcatacttcaatgatgttagatttcaattgagtctaagcactgaaaatgatgcccctcaaagcacgtctgttgacgtcaatcaacagagtgttagtaatcaggatgcacctcattctcgggaagagacgcatccacctgccaatatagtgactgtacttaggccatgccagtccaatggagatgctcagccttctcaagacaaggacattactgaagaacaagtcaaagggaacaaggaagttggatctgatatggtaagtaataaagctggaactgatacattagaatgtcatgcagtccagaaagaattgcagtgcacacttcaagatctgtcagaaatagcttgcagcattgatccagtacgtaaaatatcttctccacaggaagagaatgagacatctgtctcacctaagaacaacatggatcagcttgttcttaacaacagttgtaatggcaatactcattatagaagtggtcatcccaatacaggaaatgttggtgcagaagatcagactgttgcactttgggtaaaggtacgatttgcttatttttaactatatgaatctggctgaatatttaacatattggattgttgagacctttacatacgccgtggagataaattttttgctacatctagtcatagattttcttgtgaatttaataagaacacaatgtgtgggtgccgtaaagtttctagattttttaaagaactagattggattgcctggaccctcaggagtagcaataggcataacatagaatttttgctacactttcaatttgtgaaatctatttttttaaaaattttcaagagccactgttatgttattaagttgtgtctcagtcatggccaatcaagtagtttaccaggaagaatgacttgagggccacgagcccaagtcttgatttggttgctgcaaaagatgtagtgaagcaaggcagcaacaatgacccatctgtgaccgttattacgaagttcaagggagatggcggagctgttaggtttcctcccccatatatagccagccgccagccgctaggcagaggataagctcgagaggtgatgactcagggtcctctcctctcatccattaatttatttttttcatttcctgttctcttccctctctattttgctctcgtgctcagcagctagtagtagtacaagcaacaactgtacctctcccgtgcgtttatttttctatcttttccttatatgctccctctttttcctgggctcctctgttatctctgttttattgccatgctcatagattaagggcatcagcagcagcgaaccacagtagaacaacccaagtaggaaggaatgtggcagtagtctaaaagactgctcttcaacttattggaactagtcagcaagtcggttgaaagaccacctgactcgacctggctttacaacttgacaaccttgttaagaacataattagttcaaagctaagttatggtgtccaaacccaagcaccgtttgtcccaatatcatcaattatattaggagatgtttaataattggattggatgatttgattgatccaagggtcattgttaacttggtgatgttacatactccctccgtttcaggttataagacgttttgactttggtcaaatcaaactgctttaagtttgaccaagtttatagaaaaaagtagtagcattttcagcccaagacaaatttattatgaaaatatatttaattattgatttgatgacactaatttagtattataaatattactatatttgtccataaatttagtcaaacttgaaacaatttgactttgaccaaagtcaaaacgtcttataacctgaaacggagggagtaacatacacgctaggtttgtactcaactttgtattagaaaaggatacagtcctagttttagttgccgtcaatatcaattgtttaatgtctaaatataacacctgagtgtccaagtcctgtaatcttctgaaacttaaaaaattttctggaaaatacacaagcatttgttttatacacgattttagctgaattagcagacctgggtataactgtgctagtttgaagagataggatatcactcgagggttgtttagttgtagttattgctcctagagaaaaaggctgtccaatgcttgagattcgatctagctgtaattttcttatttcaagggtcgttcctactaggtagtttgtcttccaagtcgaggcatttcttggtattacataattttcgtagcttgatctctctctgtcccataaacatatatgcattttatgtatgacttggactaagttctctgatgtattgttgtctttgatttttattactgaaagaaaaatacttcaactttcctctatttattacttcattccattcatttatatcactgttctgaggtcaacaaccagttttctgcaatttaaataactgtatatgagttgcatataagcataaaaacttgaatatcatttatttctagaaaaaaggggattttctgatcagtgagctgttcagaagattggctatggacccttatatcagccattcaccagttcctaccttttctactcctttgcgtgctgatttctcacaactgttcagtgatccttctctgaactatcatttttcccttttgtttgaaaatagtggagaggaaaatggcaaactggaattcaatgctttagagtggactgtcctttatctactctaaaggcaaaaccaacacatggcaggaagagctatatcattgttttcttcccccgtacaagaacttattcttgggtagacatgctacttgtccgtccaattgaggaatatcctctgccactggttaatggaactcatcgcaaatggcgaaagctagtgaaggatctgagtattcctcgacgattcatcatgcagaaacttgctatttccatgctaaattttagtgacgagcttcatacagaggtctgctatttcttctatgaatcattggtattcctgtagcaccgatgacttcgtcttgacagtctttctgatgtttaataggctgtagttgagaatgctcggatggccacaacttggaaggagtttgctcgggaagcatcttgctgtagagattatactgatcttgggaagatgcttgtcaaacttcaaaatgtaaatctaagcactctattccttaaagatatatcatggaacctcctttcaattttcttgtagcaagttttatatctgttttgttcttcttacgatgctctatttcttggtcgctcactgttttatgaatgatatcctttctggctgctatttatcccttttatcactgatgcacattctggatagaacaaagttaatttgtgtacctttttttattttatctatttgtaggacatatcatgaactgttactaccatgatactagtgtacataactatgccagaaaattgagacgtacattttgacacaacgcctaataggaattattttgcagcattaatatgaaaagctaaatcattgttataagcagttggttgggaggttgctcaatcccaaaggatacactggatgataattatcctggcaaatttcaattttgtttatggttgacatgatattgtgaaaaaagggaaattggttttatggctcgaggttgtatatcttattgatgagaatgaggtcaaatgttatacaaatatttctgcgcagtattatgttcattagatcatccgcttcatcaaatttacgccatctagcgatattacagaaataagataaatgtatgattctgcaatagcctcttccagttgtttcttggcaatagtttaccttagctgtttaatttcagatgattcttccagactacacaagttgtcattggctgcaaaattcttttcacttgtggagccaaaagtgcaataatgctcatgatgccgagaccgttgaaattcttaccgaggtaatatggatttctgttattgtctaggtttcaccatttttttataagaaccttgatttagtttgtatgagttgtttctgctggttagcggagtgagtagttaatatgtttttggatgatctggtccttttctatcatgtatagtttttagtcgtgagactaagttcaagctagcacatctcaaataaagtggctgccatgtccattctctttttcagcatgaactgaaatgttgtggtattttttttaatgtaaaaatagataatgttgacttaattattgagtgtcacattaataatcttttgcaatccttgcatgggctgtataaatgttgaccacagtaggtcataatattttctcatgatttgcaccggctagctcactttcttgtctcatcatacagtccgcttgtgtggcttatgttcacctgaaatgtgttaatttatagtttttgtgatcctagctgaatttgtgtttccatgggatcatttgtttggtttgctacaaaatggggttatccttttttaccctgttctttatttagcggacggaatagtatgcagatggcatgaaatagattcctaatttgggtatgtgtctttcttgtctaagatgaaagtgtatttttgtgcacatcgaacttgaagatttcaaaccactgtcttgaaatcatatggatattggtctgtttgattactaagctagtgacccagttgtagtcacttgggaagttgttccaaagcattgtctcttggacattgtggcactctttgttaaagcaagtggatcaccagtgccaaataggagagataagttgttcagtttattgtagaaatttgaccttgttatgtagtttgactttcttgaagctaactatgtgtctgtctgctactgatgaaataatatatggaataatggaaatgatctgcactacacgtgctttactatttgattattcccttgttacacttgatgtgctactgtttctcacactatttaaagcttggccaaccttgctaaagaccctttccacacaggaacttaggcaagctattctttgggacaaggttcatgaattgtggaatgcaccaatgcagcctgaattagtccccgagtggaaaacttggaaacaggaagtcatgaaacagttcttttcatctcatccagttggcaatgctggcaactttgaacaacacaattgttatgatgatccaggtatggatcaacaagctcgtataaaacattccaaactcgaagtccgcagaggagaagctcatttttcacaagaggatgatgctaacctcaacacattaagtgaagacccaaacaaaagtaacctccccagtatctccatcattcatgaagctgtaggaccattagagtcaagagatcagaataaaactgctgccttccccagtacttctggtgtccaggacactggagaaccaaatagtgctttacacaatgtcagacatgaattggattcattcaagagttctcggcagtgttctgcatatatagaagcaaaaggaaggcaatgtggtaggtgggcaaacgatggtgatatttactgttgtgtgcatcaaagtatgcattttgctgaccattcgtctagggaagataagtcacttactgttgaaactccactgtgtggggggatgactaatcttggtagaaagtgcaagcatcgagcccagcatggttttatcttttgtaaaaagcaccgcttccaaacaaatccagatgcaatgagctcagatagtttgttaagttcgtctgagggccgtaagtgggaagagtcacagaaaagcgtggagaagatgtcttcctcaaatgcaacttgtagtgtaggctcagagcaggcaaataatttccaggttgctgtgcacatgaaagtgacaccaaccatggctgttgagacaactagtgataaagttaacgtgtcagagaacgctgatctctgctaccccatgtcaacttccatggaaaactctaacttagatgcttctatttgcattggaattcgctctcatgacaatattgctgaatgccaggattatgccgtacgacacacactttactgtgagaggcacataccgaagttccttaaacgtgccagaaatggaaaaagtcgactcatctctaaagatgtctttatcaatcttttgaagtgttgcacgtcaaggaaagaaaaactgtgcttacatcaggcatgtgagtttctttattggttcttgagaaacaatctttctcaccaacgcccgggtcttggtagtgaccatatgccccagatattagctgaagtgtcaaaaaatcctgatgttggagaatttttgttaaaactgatctctagtgagagagaaaagctttcacatgtttggggctttggtacagatagctctaatcaaatgcattctgagaaccaagatggatcagtgatggtgttacgtgaagatgggacacatccttcacctggtctgaagtgcaaaatatgttctcaggagttctctgatgatcaaggacttggattacactggacagaggttcacaaaaaagaagtgcggtggcttttcagaggctattcttgtgctgtatgcatggactcatttaccaacagaagagttctcgaaaggcacgtgcaggaaaaacatggcgctcagtatctccaatattcgacactcttacgttgtatatcgtgcaacagcaactttttgaacacagatcttttatggcagcacattgtttcagatcattctcgagatttcagccttctggatcatgtccctcgacgacctaggggtcaatctatcaaaagaacagaaagggcaagtgatgagctcctttatgataaccataaccttggtaaggatgatggtttacagaagttcacctgcagattatgtgggatgatgtttgatcttttgccagatcttggccaccaccatcaagttgctcatacaaactcaggtacagtcagtgatatcccttcaggacgtgaaaagtatcagtttaaccgtggtcggcactattattcagccttcaagaaaagtttaagaccatccggctcattgaagaagaggactagttctggagttgagaaacattttaaggctcaaagcttggatctatctatggatacatcacacattgtggaatctgagaccaccacccttggtaggttactggatttccaatgctcagacgtggcattgactttattttcaaagattcaaaagacaagaccccacccaagcaaccttgatattctgtctattgcccgttctgtttgctgtaagacaagccttcgtgctgcattgaaagctaaatatggaatcttgcctgataacatatttgtgaaagctgcaaagctttgtagtgatgttggcatccaaattgattggcatcaagaagaattcttttgccctaaaggttgcaagtccaggtctagttctaattccttgctccctttacagcctacccaagttgattttgtgatgagtcctccaattggtgatgagatatggggcatggatgaataccactatgttcttgattcagagcactttggttggaatcttaagaatgagatggttattgtttgtgaagatgttagctttggcagggagaaagttccagttgtctgtgccattgatgtagatgcaaaagaatttccatatatgaaacctggagaaattttgcaaagtgaaaattctctgccctggcaaggtttccactacgtcacaaagcgtttgatggattcatctcttgttgattcagaggtattttctggattttgcttttatgatgaacagaaacttgcatattaattgaacgaaaggaaccaagactatttttctttggtttttatatattgcaacttttttgtctcctgcaacttagtcttctaataagttgcttacctgcagaacactatggttgggtgtgcttgttctcatgcccattgcagtcctgaggaatgtgatcatgtgagcctctttgatagtatctatgagaacctagtggatctccatggtgtacctatgcgtggtagatttgcatatgatgaaaatagcaaagttattttgcaggtaataattgttactggcgtatatttttacctacacatgtttttttgacaagtactctagcatgtatggctttaggaacattggaaatatgaacagaaatgtgcactagtaccaccatcaatttctgttcaagaatgtgggttttgaccaacgcaagggaagtcttacatttgttttctccaaaatgaccaaactatcctaataaataatctcttgtccacttttctccacaaatgggatgaggatgggagatattaaataagagcaaaatgtgaagctgtgctttggaaaaaaatgacatgtcctccgtatcgtgaaccaataaagtagtcaaaagtggccagtatttgtgaatggagttgtgctggctgttcttggttgtgatatccaaagcgatttcgaattttgaagcttggcttttaagaataattttaggtagattttttagttgtcttcttaacagtcatgaacatagagctgggcaatgaaagagatgaaataacccttaaaagttaatcctaaatcgaaatctaaaatttaaaatcacctttggattaatccaaagcacaagcaagcgcagccccattgatctgatcattgataccttgatatctgtgactagctggtaatgcaaccttttttttctttatgatgcaagcacactacatttttctcaagaagtttgccatcttattttgaaatttagcttaaactgcgattaaataaatacctatcattgtgtgttgccatctccctgagctcaatatcatgtccacttatatgttcttattaaggatgtccttatccactatggtgttcgtgtatagcatactctaacctgttttaattactaatgcaatctctgagtcccatagctgtatcaaaagccttctgttgctattcacccttaaacttacttctggagagctgcagaaacaatagtagattggttctttaaccataatttacaggctccacatccatggtgacattatcgcatacaacggtttcatctaaaaaacaaacctctttattttgtcgtgatttgacctttacatccatggtggcattatctcgttcatcttttatggtgacataactaattccaatagctatctgccaatgtcaaaagggatgtgcgtgggatttgggctcattgatattgagttgttcttcaggtctgcagataatgtctgactgagtatttgtacaccttttgcttgagctcatttcaaagatatccatcatctaggcattcatttctcatcattttattgtataatttgatgtctatgtgttgttaaatttgcaggaaggatatcctatatatgagtgcaattcatcatgcacttgtgatgcctcctgtcagaataaagtactgcagagaggactgctggtaaagttggaagtcttcagaactgagaataaggtgaaatattctccacttgtttttttggtttcctgagcgttgcaccttacctttgacgtcaagataaaacctgcttacaagtgatatttttgttttgtcaaatgctgcagggttgggctgttagagccgcagaacctattccacagggcacatttgtatgtgagtacattggagaggttttgaagatgaaggatgatggggccataagacatgtagaaaggtttgatgattctcttgttatttcttttatttaggctagaaatctattggaatttctccggtgcattccatgtaagcttcattgaattttcttggtcattatgatgcccagtcttgcctaaatgcccaatctctgcctaaactatattttcatcttgcacacattctggtttcacgctgttcttgttctatagtctgaacatttggagtattattattatgctcagaaactgataagaaaattattggatctcagggaggcaaaaagtggtagcagctacttgtttgaaatcacttctcagattgacagggaaagagttcagactacagggactactgcatacgtgattgatgccacaagatatggcaacgtatcccgttttattaatcataggtaactggactattttatgtctgtcccaaaatatattaacttagaagttaatatattttgggatggaaggagtacttgggaacatcttactacgggataaatttgttctggaaccaatgcttttgccccttcattgcagctgttccccaaatctcagtacgcgtttagtttcggtggagagcaaagactgtcagcttgcgcacattggtttgtttgcaaaccaggatgtaagaattttttgaccacctcatcctacatcgttatacgtaccttgctaattgttgtttcactgttgtccagatcttgatgggagaagaattggcctatgactatggacaaaaattgctacctggtgatggatgcccctgccattgtggtgctaagaattgccgaggacgtgtgtattgagtttgcagtggggcagaaaatggtaacggagcagtccaatccttagcatatctccagaagttcctacaatggcgtcacttagcaagggatagcaatgtttttttctagagcaacaatgcagtgctaggatctaattccccatgcatcattaggaatcatcatataggtctctcaacagttattaggcacaccatacgattgattttagtgtggcacacttatgcttaactgatcatttgttaggagcaacctgaaatgaaagcagttcaggctgcattgttcgtaggccagaagtgaagtgtcgttgtaacataccttcattcaatttttactgctcataagcgccatcgtcgaagttgaaccaaaatagttctgtttgtgttgcagtgcatgtttaatgtgttgtaggaatttgttaatgcattttattatggaaacaaaaaagatagaaacaaaggaaagctgactttactactggaagtcgaagtagttgtcgaaaacattacgacgaaccgatggaaacaaaaaagtcggaagtagtcagtttgttttctcgttaaaatgtgatggtatgaactgggctgataacgtgaatttgatcaatcagaaagtggtcgtaaacaccttgtggcatttctttgttcaacatgtttttaaactaattaagtgcttcgttgacggccacaaccaaattttaaaggcaaaattggttctatggcatcgaaagttttcgattttgattctatagcattaaaagtttatggttcactttaatagcactgaaaactacatccgttactatttttagcattccgtcagcagttccgtcggctcaccccatcctacctctatcttcttcctcctgcgctctccctcctatggttgacgctctccctcctatggttgaccactcttcaaggcatcaggcgagctcgaccatgacagtatagcgctgagcgagttggagccttggatggtggcagctggttctggcatgctagaggcggcggctcttgggtcggtagacaacggatccagggcaaggaggagcgggtcggcactcaggcgagcccgcaacgagcgcgagggtggtgcttcggggcgaatttgagggccgatggatgagcttgatcgagggcagcatgtcggagagagctcaagggcgccgacaataatctggagggctttgcttccgtgcggacccgacaatgccggcgacgagctggacaatgacacttcgggcgttcatggattggatgagcttgaggatgacgcatctaggggagaccgagggcagtgcacgcggacgaactcggaagcggcacggccgcggaggaaatggacctggttgagcacgcaagatttgaacaagctctagcatggccatggcggcgcggtagacgagatcgatcgacgatggcgctgtccgggcaaagctagaacgtggatagatcacacctagcaagcgcggatgaacacagcggtttgcggatgagctcgtgagggctcacgtattacatgacgagctcgtggagccagcatactgtgttcgcaccatggctgaccggcctgagctcctgtatgactgctgtttcgagatgagaaggaagtggaagagggccaccattggtgtttgatctaattttttgttgaaaaataataataagaaaagaaaactaactggagtttggatggaatgctaaacagaaataacggaggtaacttcagtgctatcaaaatgagccttgaacttttgatgctataaaaccaaaatcgacaacttccgatgctctagaactaattttgtcaattttaaattttaaagttaattttaaaatttatgataatctatttgtgttaaatgaaacatgatattcaaattgataagactcttttttagttatcctgagggggtgtttaggtgtcacatcggatattatatagtgtgtcgcatggggtgttcgggcactaataaaaaactaataacaaaatctgtccgtaaaccacgagacgaatttattaagcctaattaggccccgttcgttagtcctgaaaagtttggattaaattttggattaaagtggcacgcttttcaaactaataaacggtgcgttttgtgcgaaaactttctacatgaaagttattctaaaatatcagattaatccatttttcaatttcgtaataactaaaactcaattaatcacacgttattaacacctcgttttgcgtgaaacaggagattcaaacaccaccttaatctgtcattagcaaatctgtagcaccacattgtcaaatcatggagcaattaggcttaaaagattcgtcttgtaaattaatcgcaatctgtgcaattagttattttttagcttatatttaatacttcttataggtgttcaaacattcgatatgacaggatgtaaagttttgggatggaatctaaacatggcctaaaatatatccaataataaattcagaattacattgatgtctaacttgactgtcagttttgtattttgttaacttaattaacttgaaatttgaaataagaattagaaattgatagttaacgtaggatcttctttaaatcccaaccactacagtttggagaataaacaatgcattcaatatataattatcaagttttttactgatgtgtattctttttaatcattccaaaaataaacaatgcactcaacatacagcgcctgtttggcagggtttcagcttctaaatttaatttatgaagttgggtctaaatttgagtcatggagcatactaaatcaaaactctacatttctaatttattttataatacttttatgtggagctgtttgattgtgatttagctataagagccctaccaaataggcttatcattaagtacttaaatacgggttatctactcatgcctcataatataaaaagattttagttatatactggaatagccagattctcttatatccgtttgtttttctcggttataaactgtagcttaaaaaatgccaccctttgattactcctaatcagttcaacacgtctctggctctctccgcaatccgagaggcggccaatatatccggtcgatcggcaaataccaccgagagcgtaggtaggccgctctcagcctctcatgactcgtgagagatcacccggtcgcggtgccagctggacgctgggggtggacgaggagttgaccttgacgtacgtgggagccgtcacggcgcgtggtaccaacctgcccggagaccagctaggccgccgacaccgccgtggcagcagcctggatactccgcacgccgattgtttccaacttaatcatgcatgcatgtacgcatgctaaaaattaggggctaatttagttgccgcgttcgctactttatataggaacacacatatcaacttaatttaaatttgtgataccgcacaaaaatacatgcaaatattttttttagaattacacattataacgcagaccctcgtaacacacgcgcactcacccctataaacacacacgcaaaccctacccttatgagcatcttcgaagactcacaacgcacgcgcactcaccactatgagcatcttcgaagactgggcctgcaaatcctggagaactcaccactatgagcttcgaagagcatcttcgaagactgggccggcaaatcctggagaactcaccactatgagcatcttcgaagattgggccggcaaatcctggagaattgacaagtcaccacaggcgcttcgctatcgatgggtacgtcgcctaccactgaaaacacagcgccgttaaatcctgaaaaattcgctcccatggggagtcgaacccaggacctcatgtgctattgaggctcttgtaaccattaggctacatgtcctttcacaaatacatgcaaatattagaaaatgataaaaatttatttggagacaaattgtatgggtggatttacattttctcaacgaatgatacaaaatatattggagtcaaaatgcctcgaaagactaacagttctttttctacaaaacaatgccgataaatgcagccaattgtttgatccaatcaaaataaaatatgttattttataagttaattactccactgttatttacagtaacttttaccctctcttgatcaaccgttcatattactccacctcttattatttctaagtatcgcaaacaccacgaaagctcggctcgtgtgatttaaaactgttttgcgtttagtacaatccatatatccttcaccttcagctattatgctacaactacaggcaagggtatcctggcgggcaaaacttttggctgaggacaaaagaaggcacagagaatatgatggcctccagaaggaacaaagcggccgtcttcgatctgctctcagatactcattgaccacctttctcgttcgcaactaccaaaagtcacccacacatgtgctccatgcgcctatctccccccgaccctaccaacaacatctatacaaccaatgaattatagccagaagagaaaaaaaatgcgcacactctcatcaagggtcaatatcaccatttaactaggctaatctcatatgactcatttaaagatacacttaatagtacagtgataagggtgtatagttttaattgtgaggtcttgtgttcgatcgtaaaccgtgtacactacaccagctggtttattataaaaaagattaatctataatgcgaaagaccggataattcacttttaatctcgataaaattgattctccgataggaggaggaagaagatgacgatgaagaagaaaaggatagctttgaaaatctgtagccaagaatgcaagagacatagctaggcagccaggataagcgaatgaattgaagcacctctttactctttagatcgaaggtgcagcagggaatcccattcaacgctaggcatatctgctagagtatgaatctgtttcttttgcgagctaggaatcttctcaaagttagcacatatgtatatatatagagagagagatggggcacaaagcttgtatatctccatggaaaatatagaatattactattttccgccgtgaggaatattactgatttgaggctagctgcatatgcgctcgacaacgatgccaactagtcacccacacgtgtagtcacgacagcatcaccagttacattatccggcacttgatcacgtgataagatcgacaactgtttcgtataacttagatttttgcattagatttgctgttagatacttctttacaaaattttccatgcctctggaataaaacacattcatgcatgtcctttagttcacttcaattgcgaggcaatataattcatttatgttttcaaagaagaaatgtttcttaggggagatttggtttgcccttttctaagatttatctagctataggatcaaagatgagagctactcatctcgctagcaacctagcacatcatggagaaccaagacaacaaccaaaaacgcctcgaggcacctcgtcgcactctacttttgactgatgttaccggaggcaggttcctcgccaccagcggcacctgcctcatagcggtggtgaaaaaataaatcctagatagccttatcatcaatagtgtctagagatggatctagacccctggtatccaaaccatggcctggggcctgaggttcagaaacccacaaatccagtagtcatttttttcactatggtgaaccgagatgacgaaaaatcagtataggtcggtccagatcttgtctttaaaatgagtctccttggtagtgtctttccgatccatcaatacggttctgatcattcatttgaccacgtcatctatttggggcatcggcggtgatgcctccacatgaagagcattggtacacaaccatgcgactacaagaaagtagcatgtagagtggtgattagtgatggtggaggtatagctttccctaatatccgacctccatatttgttttagataaataaagtttttattgaactcagccaattacgtcaagatgataaaaagcactgagcgcactttcgacctctgcataattaggatgcacccagccaaaacacacacactaaaaataaagattgtatatggtagcttgatggatatgtaatcggtgattggtctttattggttgtttcattgatctagtcatttgctactattgacatttgttagttagtttcggcaatgacgtcaacttgaacggcgttctatttctaaaaacatttccgtgaagaatgatatttgagatttggggagaaatctcttgatcttggattttgcaataaatataatgttcttattggaggcgttaccatgaagactaaaatctcaccacatttttatatagccatcgagttcgtatgtgttcttacagtgactccgattgtagggttatactttactatatttcggtcaatattaacatatatttgtttgctcttttattgttttcttagtggtatatgaactataaaatgcctagcactcatccttgctccttccattacaaaataaactaattaacctagtactaaatatgatacattgtttaggatacgtcacatttcgtactaggttgtttattttaggacagatgttatagttgatatagaggtggaaggtagtcactccacttcgcttatctaaaagctaccacattcatattcgcgataaatatggactaatcccatctttttttataataataataataataataataataataataataataataataataataataataataataataataataataataataataataataataataataataagtgcaagaacaattttgcgagcattggtttctgctacaaacatttttaaagatattttcgctagtttttttctgttcaattattagaaattttagctgccacacaaggccactatttcatcgtagggtgcctagatgcgaaaaggctcaatccaacagcagcatcggcaattctttccccctgccacctttttcttgttccaccacggctatcatacagaataaaaaaaaacagaatacacctttctgtaaagaaaaaacacaaggaaatgtgatacatatgtatatgcatatctatttgtctcttttttttctctctactttgtaaccttcatatatatatgtatacatatacatatatatatatatatatatatatatatatatatatatatatatatatatatagtaaatttgtttggtgctccatatgagtgtcctatatatatatatatatatgtgtgtgtgtgtgtgtgtgtgtgtgtgtgtgtgtgtgtgtgtgtgtgtgtgtgtgtttcagtgttcacgagtgcattggcgaaattacaacagtttgttgtcggttcaacttatctaatgtaccagagaacaagctagtacataaaaaaaatgtgcagttgtggctttctttactttaagtaaaaaatgtattcaattaaaaaggtgagttttagaaaaatgcactggctagcgcctgtaaaagtcaaaattgtagcattatggtatctctcttttttttaactttaagtcaaaactatatattctaatccctccatttcagattattcttatttttctagcaaattccgcacctatacatcgttaccttattaactatgttccattaatcgtttcccaaagctatcgatgaattgaggagatgaaagatcgtctcactttgtaatgtgaggatggcaagtatttgataaaaactttaaattctatagtgaaaagtgatctaaaacggaaggaatatttacgcagttattatacctcatccacatgggattaatgtacatctcctttagtgaatgctagagcttgcggataaaatttatatagtgacatatatggtgtatcttatgcacacaaactttcacgtgtatacatcgtgcataccaactaacaattatcactaaaaaatgtattaaaaattatacatgtacttcagtaatattacatttacgtgtaaagtcccgccttcgaattcattctacataaatagcaacaaaaaatactttcagatttttttataccgctaaaatataatgaatttgatattaagattttacacataggtgtaacactattgaaagtatatgcacgattttttttctagattttttttgtgacatggtatgcatggggtgtgcacatgaagtttgtgcatacaagatatgttcctgacaaatataacattgtaactaaaaaactagttgggtggtccacgcaattgcatggcgcacccattcaaaattatataaaattttacatatgattttctttaaaatttgctaaatagtcatcttgttgtcttaagatttttaaaaacgaatattatcatcatcgggtattcaattttatagtttttaaaagtcacaccatcggtcacccccttactcttttgccagctttattttcttgctcaatctgacataacttctattcattttatttgggacctttaaaaatcagtctcatcaggttctcatttttaagttcttagagtacccgacaaatttcataactatactcctttataaccatgcccgctctcatcttgtttattgttggaattttaaaaattgaatgtaattatcgttgggtccctttttcaactttctagaggtcctgtcaaccaccatgacacatgacactactcttcatggcctgccactatccctcctcttaaccatcattgtgattcttaaaatcatacccaatcatcattgaggtgttgttttatagtttttagatttcccatcaaccgccaccattctaccactttacatcttgtatgttattcatctctttgtcgttatttgccatcgttgtgttctaaaatagactatgtttcaatatttcttgttttatttttatttttttgttatttttaaattgttttgctacttgaactcttatttttatttttctattttctaattttatatttgtatttgttttaaactttagttaatcttgtgttgggttctacatggattgtttttcaatatttctttttttatttcaaattttgtttatttctaaattgtattcctatttaaaatatctatttttctaattttagaatttattttatttgttgtttcgaattttaattaatcttgtgatgtgttccatatggtctcttcttttaatattcttttttattctggattttagttatttctaagttgtattcctacttggactattatttatatttttgtaatgtctaagttatattttttatattaaattgcaactaatcttgtattgtgttatacatattgaatattatttcgatatttctttttttattttaattttcagttatttcaaaattgtattcttacgtaaactttttttctctggttaatgttgaaatttctaacctttacaatgaacgtggtgtcttcttttaaaactgttttagatgtatattttttaataaaaaaactcataaaatttatatgtcattgtaagtatagccgtctgatgcacagatgcgagccacatgccagattgtggatggcggggtagaggatttaggacatggagaatctaaaatgtgttccttttgccatgatagaatatatcacaagttaattaagtccaaacttatcgaaatggagctgcaaataactcggtaaattaagcatccgtgggacaaacaagagaagcatcaacaaaagacgtgaatattagggaaggaactaatatcaaatcattagaaggggagaggcttcgaacccaggtcgtctaacccaccaccttgtggagctagccggaagagaagcatcaacgacatgagagatactttccccctccgaaaatgttctcatgtaataaattctaatacgagaatttggacaaagtgagtccagattaatttgttatttaatttattacctagggagtgtttagttcacgccgaaattggaagtttagttgaaattggaactatgtgacggaaaagttagaaatttgtgtgtgtagaaaagttttgatgtgatgaaaaagttgaaagtttgaagaaaaactttgtatctaaacacggcgctattataggtagtaatattttaggacggctgtagtatatacgtaagaagagaagaactgtgctgcatggtgatcaatcagctgcaagaataggcgctggccgggctgggctatctaccttcctccctcctatgattgcagtgaaaagcatgcagcaggagatttttccgataccgcagcgcgcgggtcgcggtcgacgtcgcgcgggcgagcgatcgaccgaccgaccatgcacaggcgcgcgacggcccgtgcgggggacagggaatccggccccgtctccgtcacgggagcttcctttgactagcgcggcttctctctctctctctctctcgatcggtggaattccgggcgggccggggcttagctcctcggcccacctcgccccgcgcgccaccaatccgcgacggagagaaacgagagatggagccctcgctcctcgtcgcctatctctctttcccggagatccgtcgccgtcgcccgctcatctcattccccccaccccggcccctttccacggccatctttttgaccgggaatatctaccttttccctccccatgaccaacccaacctatacagatccatccatcgatcaaaccacagcagcacagcacagaacaatctagctagctgctggttgctgctactccattagttagggcaaattaaaggccactcctctcagctgcacctgatgcacacggtcaatgccactgtgctttcctctcctcctccatgcacagttgcacacgtacgggccagctccctcctcttctcatcgacgtatagccgatcgacagatgaggtgaccagcgttgcttgcaagcggactcgacgtatacactgcagcctgatgtgatcaccttggcggatcgatcgaaaactgatctcgccgtcgcgcaacttggtctttacaagattcagaacagcgaacctagattatatatttttcatgagtcgcttgaccgatcgagtcgacacttgatgactagaggccggggaaaagaaaaaatcggcgtctgaatttacatatcgttgctgaaagaatgtgaacgagtacgttgtagcgacagccagaatttcccgctttcgaccgatggggagataaaattctgcgcggttaatttttcagatcttttctacctttgcccccgattttcgatcaacagaatgtaaatatatgtgctttaccttgatgagttacacacacttgcactagctagctagcatgttgtcccaaatgtagcatttccaacgtgaaggtttgaaggctgggttttgatgctgcactgtttaacacatgtcattaactaaagtctccaaacaacgtgttaaaagtgttttaggagtgacaactacttaaggagcctaggtgtctgtgtgtccctaagaaaaggtaaagacagatcaagaaaggaaccttagatactaggaagcatatatcccatactaaactagctagattacgataaactgcaggcttattcctcagaatgcatgcagcagtgacgacaagacggtgattcccaggggtcattccttcttcctcgtgaaggttcttccatcctttcaacgtttgttgcctctataaatagcctctccatgttgcctaccgtcctcaccaacctagctaactagcgcccctcgaggtttcagggagacaactgatcgatcagaaaccttggtcgaccgatcagtaagagcaactagagacagaaaccttaattctcgatcagcaggagttgtagtagtgctatatatgatggacagcaggagggagtcctcggagaccctgaggtaagatggtcacaaactgaatgccattactacagtagtattgcaagatgagctgagcatgcaagactggtgtgtgatgaactagctaattaatcaagctttaatcatgcatggtagtacgttcttctcgtgctctaaacatcgagctagatatataggacccttttttttcttgtcctagctagttccattcaataccttgaatatgcatgtatatatgatactacatattctgcgcacgaatgaatgagtaccttttcaactttcttatcccctattgccggtgcaaagaatcagaatttcataaatgcgtgcatagtgcctcgctcgcgatattctaaagacgcgatcgaactcaatcgatgaatgaaaatgatgatctcgcaggaacaaatgcgcggcgtgctacaggcagtacaaccggatggagcacctggtggagcacatgaaggtgtcgttccactccgcccacgagccccgctgcggcgtctgcgccaagcactgccgctccctcgagtccctccgcgagcacctcatcggtgagtacacaagtagccgtttttaatttgctcggttgatgcaacgagctagtttttgtggagttttcgcgtggtatctgacggtttctcgcgtacgccgtgcgcatgcagggccgttgcccaaggtggagtgcgcgcgcgtgttcgcggcccgcggctgcagcatctgcctcaacctcttcgacagcgccgccgccgtcagataccaccgcgcctccacctgccagttcacccgcgccgccccggtatgtaatcccctctcacctcagttacactgcgcatgctagtttgcaaggcttgttgctgaatttgcccgtggttttcttgcgtttgcatgcagatgcccaggggtagctacggaggccgtgcggtggccatggcgtgtaagatggtcggaggaggaagcgatggctcgctcgacatctgcgcgagggtgtgcctgatcggagaggacgagaacgtcatcttccagacctatgtgaaacccaccacgaccgtcacaaactacaggtaaaatatataggagatgatccattattttattactgatgatgtttctgagtgttagctagtagtacaatttttagctgtcattgttcgcatgtgtagatctatcggaccagaaaagcagaaaagacataatggaaaaccgagcaataaacatactgctatagaaactagcagtagaaattaaaggcatagatcgatggatagttttatgagatgatgaatgaggggatgatttatgatgtttctgttcaggtatgaaatgactgggataaggccggagtacttgagggacgcaatgccactgaagcttgtgcagaggaggatccaggacatcctgtgcaacggtgagccactatggaagatacggccaaggagctctgggagggcaaggatcctcgttggccatggcctggagcatgaacttgagcgcctgggactggagtacccggcattcatgatcaggtcagcagcacaaggcaaattaatttgctgcaaattagaccttgccagtttctcccttgctgacacaatttatctctgcatttttttcagggatactgcaaagtacccaccactgatgaaaactagcaagctgagcaactccctaaagtaccttacacaggcatatcttgggtatgcaaacttgctaagtcagctgtacaatctctatagactcttagactttgcattattaatgttgaagatactatccttgaatccctattgcaggtatgatatccacactggcattcaggatccctatgaagattgcgtggcagcgatgaggctgtacattaggatgagatcgcaagcccacccgagagactacgcctccggttcaggtgagacgcagaacaactacccagcctggaggcagagggagctagagaggatgagcccagaagaactcctggcactctcgggttcagattactactgttggtgcctggatttctgaaggctgaactgatcggttgaagagaataaggaagagccaacattgatggtttattcatgtttcgtccaaatctctatatatttataagtatatcttgggacttgattatagtggaattgactataatgtataaagttatcctatgtaatgctatcatataatattggtgagttagagttgtatggagtgatgttaaacagcgatgatatatagcaagaggctttccactttgcttttttctaggcactttctttaattatgtctctagatgatggcaataccaacaaatcagttatgtgccacacacccaaataaaaagacctatataacatcatacagaacggatgaatgaatgaacatacactttgtgcagtgtagcaaactacctcatacaacgcatacaaagtactgcagtaagtcatacctgtgcaaatgtgtgatgattgagtgtgcgcacgaattgctctgacatttcagtaataatcattgaacagtcagaacaggtttgacatctgcaggtttaacgctcagttctcctgaagatttagcatttgccgttaagactttttccagtgcaggtttaacgctaagttctcctgaagatttagcatttgctgttaagactttttccagtatacctttaacatctcctgaattacccttctcaccattttcctcccgcttggattgactcctatttaatttgatgaactcaaggcactgtcgaatgattgtcagaaccgtgaaatgtgtctcaaagtcgttcttgatgacaggaggatggcgaaggttgggaccattattgttccaggtgtagttctcgatgaagtagacacaatctgttctcgccctgaatgaaacctctcgtatgagctcttcagcttgtcttgctgatctcatggccttcttgaaagtcaatacaacaatcaaattcagacctgttaacaagtgctcgtcaacaaatatattcatctttgctaacatatgctgagtaaaatatggtaatagcaaggtcttcatagatgtggaagaaagagagaaacaaaggaatctccatgaacatttgcaataccctgattctaacacaactacacaagtttggatcagaaagggttatctttcaggacattatagacaaaatatactgcactacttcatggtttcgaaaaatatgcatattagcatatatcagcacagcatctgtgctcgtgtattaataacacaaaaagctccatcaaacagtcaatatttggtaactgctgacggtcacacctgaacataaagatgacaacatgacaccaggggaccagtccaaatgatagcaaatctctatcagaaaactattcaaaactgacaatctagttaaccatcaagtgtccacaaaccaaacctgcagaaattaccatcccttgccttttacctacatggtagaaaattgcatctatttctttaagcaatcacaattcacaactatcctacattggacgatgcgaaatcgcatcatcttctttcttctaaggacatagcaatatagcattgtctaagcatccgagatatctacgaaaaattatactactaacatagtttttttttttcgcaaacgcgcaaaaggaatactactaacatagtaaatgagatattgagaataatgcttcaatgctactgttgctaagttgccgagttctagaaccttcttgaagctgagcagactaacctttcgccctcacggcggcggagatctccggcaggcgcttcacggcggcgttccgctccttcgcgggcgcgtcgcagcgcagcgccagcaccacgcactccgggttccccccgctgatcgccgcatcgatgtcagctctcgtggccctcgtcgcctcggggagcggaggcgcgtccagaagctccaccacggcttcgtccgtccccgcgtcaccgctatccccggccaccgccgccttcaccctccgccgcttccgcgtgccgtcggacccgccgcccggcggcgacgcctccgcgcgcagcagcagcgggccttcctcggccgcgagcgcgcggcacgccgtgttcaccagcgagctcttcccgtgggcgcggaaccccgtgatcagcacggacggcgccggggcctcggcggcgtcctcgccttcgccctccccctcgacgacgccgtcctcgttgctcgccacgagggcggcgacggcgtcgcgtatctcccgccggagggaggcgacggcgtcatcccgccggagccccgccgcgacaatgagcgccaacgcgccggcggcggtcgcggcggcgatcttgaggaggaggggaagccgcggtatgggcatcgaaaagaagggagggacccttttgtaatatgggattttcccagggcttgaagtggataaattatgcatttgttgtactactatcgcaggtttgcagttccatggaggcacagtggcaaagcttttgcgaagatttggaggagatttccatggaggcttttcgacgaagctgcatgacgagcaagtatggaatgtcggggaatgcgtcatttgtactaacctgcaacctataaattttgatagctgtggtattctacttatcgtatttacaatacatgatgtgtggccttgtacatttattttgtatccgagattattaaaggtatatatacgtatcatattaaaggtataaaagctttggcttagaatgtagcttgaaatcacattgtatttttagagagaaggcctcacggcccggcttttttttttgaaagccacatacggaagagtcatgatatgggggttacccatttttacaaaggaaacacaatatgacaccaataggtgaaaacaactagatgaaagcagcaaacctctcaatctcatacaaaagggcgaaataggattaggcataagataaaacaggcaccaacacaaaaggacatttgaaatcacattgtgcgaacatagctctcatcaaagtaacctagtgtgcggagctaatgcacaaggaatcacaatgtgtgaacagtttcgtcattatggttgttttgacccattgaaaccgttatgtagtaaggggattcacatcctctactataatggcactaccattatagacactgacgtgtggacaataggagggtgggacccatataccagttgtgatattatggtacaggaccctcacccgtattaaagagatatgtcctcgacaatggttttagtcatgtggaccctcatatttaagaatatttgtattgtaattgcatttagtttttgtgtttcaaaaatgcaatatagctatgaaatatttgtggtggttatgttttatccatgttttcaactttagcagagattttactcctatttttctaactttatgatattgcccttatttttttcaaattaaacatattaattgttatataagggattcgatattaattgttaactgcggaactcctggtgcgcctgcacgaaggcgatggaagaagctttagatgaagccctccgggaggttctttgctttgcttgtggtgttgtatgggcaaatgttgtgccgcatcgaacttttttcttctgctcacatggaaagaacttgtgccttttgatggcgtttagcctcgctattcgctaggacacgaaaaggataatcagatgcggtgatgctcccttttcaggcctaccgggttgcgaaccataatggcaatagcttaatactccctcctcccctaaatgtttgacactgttgacttttttaaacatgcttgattgttcgtcttattcaaaaacttttgtgaaatgtaaatttgtgtgaaatgtgtaaaaatatatatatacataaaagtatatttaacaataaatcaaatgatagaaaaagaattaataattacttatttttttttttgaataagacgaacggtcaaacatttttagtaaagtcaacagcgtcaaacattttcggaaggagggagtatgtgcttcaattcctcactgaaaaattataattgaacatgactctccatatttgtgatgtcacatgggatttgcaatgtctgaagatttttatttttattttttaaaaagaaggtgcataaacaatctagccagtagacttgccatacttttacgctcatatttattccaatcagggcacggcagtacaaattcttgcttcgaacaatcaccttgagaagaaacccaagtcgaccaacacaaaaatgctggacaaaacgccactggtcaaaacagaagagtgtattattgagacataatcgaccctagaggatgcaccttatttgtgttagattgatgcaacctccattgagagactgcatctagtgcactaccacgggcaagtgcttcagtgcttccgtcaaacagatgggatgatcacagttgaagtgctttcaggcctttcattagtgcatcggtatgctctggcttgcccactgaaatacgaatatatccctttagttccttcttgtcatagtggcggatcattactcccatcttcgcaaggtcttcctgaaaattgtttttgaacaaaattatgtgaatgatgctgcaggcattatattgttgaaactaaatcatcagcatttcctttcaaagtatgaatagtaatggtcttagacacaataactatattttgacttccaggttgacattttaccacctaagaatataacaacagaagcagttattacattgtaccacaacaaaatacagcagaaacttgtactccatcccaaaatataagcatttttggatctcgacacagtcttcgagatgctactttaaccaataatatctatcaaaataaaatgttttaaatataaaaagagttacatattatgatagtttgatcaatgataaatctagcaacatcaattttacattattgatcttttttttatttttttgctattaatagtcaaaattaagaatggttgacttgacactatgctaaaaatgtttctattctgggacgaagggagtaacatatactacctctgtaaacgtatgatgttggttagttcaatttcaaactaaccaacttcaaacaaaaagaaatggagggagtactaacaagcagtgcaaacctttattttctttgcatctttgcctgatgtgacctcgcagagaataaagttagagtggctgggaaatggctttaggaatggtatttctttgagaagatcgtacagcctgtccctctcttgtagtagcagatttttcacttccttcagtaatgaaatgttcaacagaagcacaaagttagcagatgccaaattactaaacaaaaatttatttatgatatgtttccagagcacatacctctaaataagtcgggttctgcaaggcagcacaggctgaaacttctgctgctacagaaacattatagggctgcttagccctccataaatactcgattatgcttagaggaaatgctccgtaacccacacgaagtccagctaaacctgcattatcaataatttgtaatgaggtgtcatttttggttcataattgtgtggcaaaaatgccttcaatgaatcagctagacaaagccatgctagtaactactaaaaattagcatgattcagtaaaatgagttggcaacataagaagaattgattattttattaaatgctcccttagcaatgtctggacatcacataataatgcagcagcactaaaaaaaattatctaacgaaaaatagaaattctagtacagataagtgatttccatgcagtactatgagaaaacgggtgaggtttttggatttttcagaggatatagcccggtgcagaccagagaagaaaaaggcaaacagaaactacagacctgctcgtttgctaaatgtccgaagaacaatcaaattatcatgcttcttaacccatgacatccttgtttgaagactcgaaaactcaatatatgcttcatccagcactacaagtattggaagatcaaggatctttaaaagatcctcatcattgattatgctgaaaaatagaattgaggtaattcagcgaaatactaagatacagaatctggacaacatacaaccaaaacagccccattctcgcatgagaaaggtgtacctgccatctgggttgttcggagatgtcagaaatatggattttggcttttcctgttcaaccactttgacaatctgtgcaacgtctagagaaaaatcaggaagtctcggtactacataagagttcaaatcaggattacattagagggtggtaactggcatgtcaaacagtataagaagtgaacaccgaattaagacattacagaaggctcagtaaatagaagtacagctcaagaaagaactacctacccttgatcacaagtgcaccattgactgacgcatcaaactcatacatcgtaaaagttggagggcaatcaacaattttgtcacctggttcgagtacacatctgcattttcaccattcaaactaggctattacttttttattaaaaaaaaaactaggctattactcaactcggatacaaaaatctcgtgcaaaaagcaggtataaaacaagctacatgctaacctcattattaaatcaattaattcatctgcaccacatccagcaagtatgtactcagattcaagaccagaatcttcagcaagagcagcacgcaactgacggctttcaggatcagggtacacatagggaaacttcaaatttcctaatgctttagctacctgtataaaagagatatgcattagatggagagaaggtataaattatgtacaatgagaatccagcccttcgtatgctcatacaaagatctgttaaattttctgttggaagttcaaagatagctagtgtttctaatatgccactttgaattgatttataatatgctagtactattttgaatttgaattattaggattcattcttaatttcttataacacatggttcatgttgacatggtcaaactactgtttcttaagaatgtattgtttcaagtattagaggtagatgctactcttgtttgggtattacaagaaactcacctccggaggtggaccatatggattttcatttgcatccaacttgattatatcctctggtttacgcccaagccgagcggacaacacctagcaaggagagttctaaatttcagataacagcaaaaccactataaaagtggcgcatcacaaaaccaacagtaagcttggtaatactactcctatataagctcagtaatctaagctttactgctgtctttcacaatacagaaccaaacagcctcgggggcctcgggggaatttccacaaacacctcgcgcggcacgggaaacggtgcagcgttctccacaaactcaaccaccagtgggaaagagtgctgctcctacctcgaagggcaggatgggctggtacggggcgagactcctgaggtgttcccggatgaaggaggcgccgctcggtcccctcttcgtctcagccgccgccgccgcagcagcggcaggctcctccacggaagcggccgacgccatggagcggaaggataccctggacgttgccgggcggcggcgtcccccctcgccggcgacgaagtgggcggccgaccggtgcgggctctggatgcgagctcggacgctgaaatccatcaacgaggaggtgcggcgcgggcggagtgtgtttttcaggtggccacggctcgtgtcaccacggagggccaagcgagacggagaggagaggagaggagaggagtaggaacgagattcgcggggcccacgcgcgcgaccgcctcgagattcgtgccagggagtcgggtcgacgtcgacccactcacgacgctcgcgtttaggagtggcccgtcaccgcgccgctggtcgcctgggcgttgtagtcgccgtcgtcggctcgtcgcgagtcgcgacacacggcggcgttgttttcgctcgcgcgcgcgcggcgcgtgagctgcgcagaccagctcaccagcgtcccccgcggacgaagccttgcagaggcggcggctggttgcggaggggaccaaagcgtgacggacgcgggcgtgtttgatgttgttacgcgagcctatattggcgtaatgcgtggggtacgtatacgatccaaaatccaatcatcacgtgcgtgtgcgtggagctgaggtcgttgtccggtgtcgcttgtcgaccgagacacggcgcaccgcgcaccgactggatggattctgtgtgcacggcggtcggcagcgatacatatgtcgccggcacgctctgggagctagctaacacggaacctaacggatcggtgactggatttggggaatgggcttctataactccaagtgcatgcgtactcgtttgcttctcggaggagtatcaatcaaaaggtttgtacaaaataaaaaccgtgataccattgatacaacgagagcttttatcaaaaggttatacaaaataaaaaatttatacaacaagagcttttatgatacctgcgagctacttagaggtattgagaggtaaaacagtatggaccatggatcaaaaaagtggtaagatatagaataaaaatcatggtagttgagtaattaactatataaaatatgggcattttgagtgaatcgaatacctggttgcattgctcggtagcatttggtggaaaaaatgtaaatcatgcgtttaatttgggcattgaatagatcttatggggaaaaataggttgtcttatttcttctatcttttcggtttgttcttgttatagggttgaaagtggttcactggaatgaaacaaagggaaaagcactacatggttgaggattcaacatgggacgagatcgaacggttaatggctaagcgaatcttatcaaataagatttattttatgtagttgattagttatttacatatagttcataaattttgttgtataagggactggaatgagatatccttctatgtttttcttctacattttggacaggtgcacccgcaaggagacatggtagaagctatggcaagatctaagtgacacgaataattaaaaagaggagttttgacgcgttcttgggaacaaaacacaaatataaagaaaaccatacaaacgagaacttttacactagtaacgtgttatttggaataaaacaaaaatatataggaaaccatgtgaatgagaatcttagagaacgtgacgtatatctaggggaaatgacgcaaataagaacatgtacgccaataccagacaaacgacttaactagtacctacgcggtataccgatttaaatttagggaccgttatgttcttttttttctctactagcaaaatcatatttttatccttggtacctgtaccaatgctttaattctatacatgtcattcactacaattgattttttactcttttttttagaatgtgaacaccgtaaacatacagattcaatccacacagccaaaaaagaacataaatagattcaatcaacattattgttcatagccaaatttgtgtattttggagtattgtgtagattgaactttacattctatgtattatgtctgtgaagtgatatgtttaatcatacatgtcatatatgatattggtaatatcgtgatatgtacatttgtgatttgttaagtgtgcgcgaagttgtaaatacacttccgtctggagattcaaagtcctctgaaaatatacagaccaagtggacgctgcaggtgcagggtgagcatgcatgcaggccagcagagaaaatggctccgtcagcgtctgtgttacagacttaatgccgtgtgttttttattcattgtcccttctcgactctgaagttaatattgtgacatgtacatttgtgatttgttagttgtccactgaagagcgatgcaaatggaaatggccggaacaggatgtaattgattaagaactcaatgagcaatcatcagccagaaaccgagctcaacgcctgaattatgttgcgactgtccctaattaagcttgcattgataaattaagtactctagctaatttagtcacaaactctctcgagaacgagaggaaacctcaaggctgggtgggcatgttcgtcgtctccaaactgatccggacgatccacctgctccgtcgtccggccccagaagctcccgaaccagaagagcccctcttgctcgatcagcgcctcccacacgccgccgtcgtcgtcgtcgacggcgaagcacctctctttccaccacccctcctcgtcgtcgccgccgcctccgttgatcccgccgccgaatgcgccttggaatagatcgtcgtcgtcaaatagctcctccagctgtttcttcacgcctgcagccgggtcgaccgtgctgcagcctctcttggccgccgccgccgccgccgatgatgatgatcttctcccgtgccatctccggaggatgatcctcttggacttgacaaccaccttcttgggcagcctgacgaagaggaacacggtgatctgcagcaccaggcacgggcagcagcagcacaccaccaggcagtccatggccaccagcccggtggcctcggcgcccgccgcgcacgacgacgacgacatcggcggcggcagtcggagacagatcgatcaccgtcttttggacagtggataggaggaggaggagaagaagagatcgatcgagcttagctattagctatagctagcccatgcctaactgcatcgtggctagcgtgcctggaggagtgagacggaggtgttagtttaggttgcttgagaagctcgagtggcttgacggatcgatctcgttgattctttcaagccaactcattgctcatctcccttaaacaggcaactaacagctagcctagattggcgtttcttgtactgaagttttggtctttggagctaataaggcatgcacggaagccacgcacgcgtcaggtaaagccacgcatttcccgtgaatcttaacgagcgttttctgctggtaatggtatgacggcccgtaaaccggtttctctcttttaattcctaaacatttaactatttactacttttaagatatcatgtttaactatttaccactcgttgtttataagatatggaataattaaagagtgtaaataattaaatatctctctgaacctcttcatcagctgaggcttggataaagtagtacaacatagtcaaataaaaaagaatgcggtttgaaagctgctgttagactaaaaattagccaatgatataaacattatggaccatatgatgtggttgcgtgggggagagatcaacttttttctttttaattttgttcaaacctgttttaaacagaaaatagaaaagcataaggcattgtccaggcaaactgaacagctgagcgtccatatctatctatctattatattattaaaacagctttgaaaggagacaccacgttcgctgtgagggttagaaattcccacattaatcggaaaaaaaagaaaaaaaaaagaaaaagaagagtccaagtagaagtacaatttaaaaatagctgaaattcggaattaaaaataagcaatattgaaagaagtttccatataagaacccaatacgagattaatcaaaattcgaaataacaataaaataaaaatccaaaattaaaaaaggaaatgagagtccaagtagaaatacaatttaaaaataactgaaattcggaattaaaaataaggaatattgaaataaattttcatataagaacccaatacaagattaatcaaaaattgaaataaaaataaattaaaatccaaaattagaaaaggaaatgagagtccaagtaggaatacaatttaaaaatagctgaaattcgaaattaaaaataaggaatattaaaagaatagtccatataagaacccaatacgagattaattaaaattcagaataaaaataaataaatccaaaattggcaaaagaaaataaaaaaataagagttcaagtaggaatacaatataaaattagctgaaattcggaagtaaaaataagcaatattgaaagaagaatccatataagaacccaatacgagattaattaaaatttagaataaaaataaaataatatctaaaactagaaaaattaaaagagagttcaaacagaaatacaattttgaaacaactgaaattgaaaataaaaaataaaaacattataataacacaatacgatattaactattttttttaaaaaaaaatctgaaattagaaaaagaaaattaagatttcaatttggaatacaatttataaataactaaaatttgtgataaaaataaagattattgaaagaaaataccatctaaaacacatgacgagataaattaagtaacatagctataaaggagtagagtggtagtggttgatacgagatataaaaattgttaataaatcaccaaaatagaatcctaatgacgattaaaaggagggacgtcaagcaggccgtgaagcaaacgtggaaagcggttgccgggacttctagaaagtaaaaaaaaaccccattgataatcatattcaatttttaaaatctcaatgacaataaaaagtagaagcagcgggcggggtgtataagagtataattgcagagccgccgacggttgacgggacttctagaaaataagaaatgaattccaacgatagttatgttcgatttttagaatcacaatgacaataaagatttggcggcagacgggctgtagaggggcatagtggcatcgtttgatgggacttctaaaaattataaaaaattaaactgcaagtccaatttttaaagatttgaaacttctaaaaagtaaaaaaaagcaaatgataatcatgttcgattttaaaatctcaataacaataaagaagggagacagcgggcgagctgtagaggagtacaatggcaaagccgctgatggtttggcgggacttctagaaagtaaaaaatgaacccaaacgataattatgttcgatttttaaaatctcaatgacaacaaagagaagagacaatggacgggccgtagaggagtataatggcaacgtttgacgggacatctagaaattataaaaatgaaacccaacatgacaataaactctaaaaactataaaatccaaatttaaaggttccaagaagaatgaatagaaatagtgatagattgagcaagcaaataaaaaaggagatgacataaggggtagcaactggtgtgacttttgaaaactatataattagaaacacgaggatgataaggtttggtctttcaaaatcttaagacaatgagatagctagatagctatttaataaattttaagtaaaatcatactaaaaaaatatatgattttgtttgggtgctagccgcgtaattgcgcgaaattctcatattaatcggagaaaaataaaaacagagtccatatagaaatacaatttagaaatttaaaattatattgtcattttaatatatttgaataatacattgagaaaacatatatgttattatatgagagaaaatataatgatgctaaggcactacgttcgctgtagggctataaattcccacattaatcagagaaaaagaaaagaagagtccaagtagaaattcaattcaaaaatagctgaaattcggaattaaaataaagcaatattgaaagaagtgtccatataaaaacccaatacgagattaatcgaaattcgaaataaaaataaaataaaatacgaaattaggaaataaaacgagagtccaagtaggaatataatttaaaaataactgaaattagaaattaaaaataaggaatattgataaaagagtccatataataacccaatacgagattagttaatattcgaaataaaaataaaaataaaatccaaaaatagaaaaaataaaagaagagttcaagtaggaatacaatttaaaatcaactaaaattcagaattaaaaaaaagcaatatttaaagaagaatccatataagaaccccatctgagattaattaaaattcagaataaaaaataaaataatatccaaaattagaaaaattaaaagagagttcaagtaggaatacaattttgaaacaactaaaattcaaaaatgaaaaataaaaatattaaaagaacactatacggtattaaatattttttaaaaaaaattctgaaattagaaaaagaaaaagaaaaaagatttaaaatagaatacaatttataaataactaaaactggtgataaaaataaagattattaaaaaagagaccatctaaaacacacggtgagataaattaaataacaagcctataaaagagtagagtggtggcggttgattcgacatataaaaactgttagtaatacaccaaatagaatctttagaaatcccgtcaaatgctgccaatatactcctctatgacccatccgtcgcttaatctttattgtcattagcattttaataattgaacaaaactatcgttggaattcatattttactttcaagaagtcccaccaaccatcggtaggccgtgaagcaaacgggtaaggcggttgccgggacttttagaaagtaaaaaaaataaaccccattgataattatattcgatttttaaaatctcaatgataataaaaaggagaagcagcaggcaggatgtataggagtatagttgcagagccgccaacggttggcgggatttctagaaaataaaaaagaattccaacgatacttatgttcgatttttcgaatcccaatgacaataaagagtaggcgtcggatgggtcgtagaggagtatagtggcatcgtttgacgtgacttctaaaaattataaaaaataaaacccaacaagacaataaattttaaaaactacagggtccaatttttaaagatacgaaacttctaaaaagtaaaaaaacaatgataatcatgttcgattttaaaatcttaatgaaaataaaaaaagaagacagcgggcgagccataaaaagtacaatggcaaaaacgctgacggtttggcgggacttataaaaagtaaaaaaaatgaactcgaacgataattatgttcgatttgtaaaatcccaatgacaataaagagaaaagacagtggacgggccatagaggagtataatggcagcgtttgacgagacttccagaaattataaaaacgaaacccaacgaaataataaactcaaaaaacagatccaatttttaaaggtttcaaggagaatgaatagaaatagtggtagaccgagcaagcaaataaagaaggatatgacagaagtaaggggtagcagctgatgtgacttttaaaaactatataattagaaatacggggatgatacggggataactatttaataaatttaaagtaaaatcatacttaaaaaatatatgattttgtttaggtgctagccgcgcaagtgagcgggccacccagctagttctgattacgcgaaacatctctgattcatggcgaaatctgaagctcaattttaaggatttacagctggcctggataaataaggctgtgcatgcctgcaagagtgcaagggcctcgagaatgtggggcgaggcccagcagcgtccagtttttatgttggtttgggccatgtttagacccaatttaaactttcaggccaattcctttgggcctccttaaagtaggatttgcttgggcttgatcggcagtatttgcgactggcgcagcacatcatcgactcaaggaagaaaaagttgacgttcatccataattaacaacagcagaaagtagaaacggaaaagggcgagagtatggaacaaatggtagaaataactgcatctaccctgtgcctggacaaagtcacaaagacaaacgtaaagttggaaatgtttcatgggaaaccaccttgcatgttaatcaaacaacaccagtaaagtccctgatgtatacatttctcaaggttaattcgcaaccccttgcatcttcctgaattttccacggatagtatgactaccagccatcacacttttgttccctttccatgtagtcctccactcgatccaaacaaaagccatccttgcagtttcagaaatgcagactttgctgtttgctctccctcttttttttttctgaacttttctgcacctatcctcctctgatccttcgacacatcaccatcgtggagtagtagtagtagttttgcaaagcgagctgacgctttcgacgaaacctctcaatattccattcctgctcccatcccatcccatgctatgctcgtctgaattctgatcgtctcctccccaactccacgacgatcccactcagctggtccattccatcgatcacacccccccactggatgcaagaatggcggccactgccatgccgtcgtcgatgccgcctccgcctccggcgatcgcgacgttcgcggcgccgctgcagccggactaccagggctccgtcaccgccgccgccgagggggcggcggcgcggggccacggcggcggggggtccatcggcacgttcttcgccgtgctcgcggcggtgctggtgctcaccctgctgtcctgcgtcctcggccgggtgtgcgcgcgccacgccgacgggcccgacgagcggtacgactgcgccacgctggcttgccggtggtgctgctgggggtcgccgccgcctcgccgggtcgccaggcggcgggaggccaagcccccgccgcccgtggtggaggaggtggcgcccgccgccgagctgccaccgccggagccatgaactggagatcgccgccgcctcggcttcccaggttgttccagcctactacacatccaagctccaagcttccaagaggatcacacatgtatgtcaatgtggtagagtctgtaatcgtaaatgttctttgaaatccttctgttcttcatgttaccattagaagttcttagatttcagccccccttctttgtacactgattaatggataaattatacattcagttcttgatacaaacttatggatgttctataccaaagttcatttcttcagttctctcctttttttttgaaggaaacatgtcttcagttattgactctgtttttttttaaaaaaaatctctgtgagatatataagagagctaattagtggagatcatctgtggacagcactagtgattaataacataatcaagttgtggtgggctggcgacccctctccgctgtgataattaagctggtttagcagtgattacattttcagacagacctgtgccggaatgttaggtgtgcgtgcatggcacggttggtgatcacaataaaggatgtacgcctacccaccacatggacggcagaagaattgtccgtgtacgtaccagaccactgctaccaagtaccaaccagctatctatggctctgtttagttccaaagtttttttccaaacttctaactttttatcacatcgaaccttttatacacacataattttttaatcacatcattccaatttcaaccaaacttccaaacttcagtgtgaactaaacacagcctatctatccacggccacatctctcgctacatttgccactctgccagtctaattccacgctacaatcatcgttcggcggcggcggcagcagaagcatcgccgagttggcttctatcgcggctgattctgcaggtacgaaagatatcaacctcgaaatgggacgtgcggtgttgctatcaaaatcagtgtagtagaagtccagggtgaccagaaggcggcggtagttgacaaatgacagcgagtcggcaacagctgaagctaacattgtaaaggatttcacttcttgagcagaagtccaggctctccaggcagttggttttcatggtaggagtagtggtaagcattattactggagcagtatagtacaatctacggcaaggtgttgtgtttacggaattactccctccgtcccataatataagagattttaagtttttacttacaatgtttcaccactcgtcttattcaaaaaaattatgtaaatataaaaaatgaaaagttgtgcttaaagtactttggataataaagtaagtcacaaagaaaataaataataattttaatttttttcaataagacgaatgttcaaacagtgcaagtaaaaactcaaaatctataacggagggagtacggtcggacagtaggacgacggcctgtcaaaggattcagaacccaggcaggcaacaaggtttgctcgtaactgccacgagaagatggctgcaatcaaccaatgctacggcccggcccatgctagccgggcgttcttctttctcttgggctatttgcctaggtatcaggaattcagggaaaacctatctgatgaacttgtttgagattttacttactgtattacttactgtgtatggtaaaatgttaataatttcctgtcagttgtgaaaaacattcctaggtcgataccttttttatgttttagattggattcatttaacgacgtgtgtatgtttgtctgaaagatactccatgacgttatgatttcattagttgttgcactttcacggcagtactattattttattatcatggaaattggtggtcagaattgaagtcttaagactatgttaatgtaatacatatatttttggataaatgaaggatgaatgaagcatatttttcttaaacggaatggatatatagaggaaggacgtccctaagcttcttgattgcgtatgttaacatggtgcttttcttttgaactttcgtacaaagtcgaatccattttatactttttgatatgaaagcaactgaagatcaaccagagtgtagattagattataatgatatgtcatcatgacctctaccaacaggtcctaatggatgattttggtgaattttgaaaatgttgtccatggcaactattatagtatgtatagtcacggatcactcgttaattttaccctagaccgtcgtatatacatatcgccaccttaattttatactccctttggattgatatcattggtcgttttagatatgtcctcacaagcaataaattattgagattcctatttcctattctacgactcctattaaatactgtcgagcgtgtcatctaagccaacaccaaattgctctcagctggattaatgcatgtatcatggagtcggcaaccacgggcactttttcgttggcctctcccaatgagtcagcggccatgaagccttaattgtcgacctcatacatggaattcatgactacgaccatggagttgttaatatggatctcctcatcattagccttgtacattgagtcagaaactatggtttattggttctactctcaattgaaacccttaacacaacttgggacatgtatactcccgcttaaattctctttatgagtatacatgtgcgtgaacataaccactatgtcccaagacaggtgcaatagacgaagcactgaagtaactgagtcgaacgcgagccatgcatgcacttcgtgtacagaaaagttgatatagtaaacaataacacccggaatacatagggacaaacttgtgataaacctcaatggaatcgcttcagcgataaattttaccatagactgccaattgagcttaaatgactaataatatcatcctggatggagaaagcccctagttagagttaccgttatgtcttttagttatgcacaagaaaataagtattaaactctagcgtatgatccaaaacataatgtacggtgaaaaaaactatcacgcttagctagttaccttttatctgtcctaccactttcttaataacctatttacggagcaacatggtgaacacatagaattactctcactcctgatcatgtagcatatccactatgtttcttgtcattcccgccatatattgctagatggccccacgttttgtatataatcttatattaacaaagatagtgaaaagatactccgtcagtcccacaaaaaacgaatctagaactagatgcgacacattataatacaatgaatctgtacagatgtatgtctagattcgtagtagaatatgtcacatatagtattaagttagtttttttatggaacagagagagtacaccgtttattcctctcggtccaatccttcaaagtcttccaaaatttcttacgctaggaaactatcgtattttgttacatctcacgtcaagtacttcgtatatgactttcatcatgtccactctctttacgtatcttctttcattaggatacaaactgccatccatacaaagtactacactcccggttaaaaagtcacaagatacagtgagtccagaaagacactgcgagtacgcgcgcggaaatcgcagcaaaatacggcctttcgcactagcaaacacgctgaaaagccgcacgttatcgcacgggaaacggcgcgcctcgctggtctggctggctttgctggctccgcgtctagctcgcggttgtgtggagtggagtggactctccccctcggtcgcggagacgcggacgcgcgcgctcggtcggagcagagcccaagtctcgctcgcgccgaggccgaagcgagagcggtcagtcgcgcaggcggacgctcgcgcacacgcacacgcaccgcaccgcaccgcaccaaccaaacaccagtcagcacgcagcccacccaagttgacaaacgtcactctttgtctcccccaccccgccgcgctgcgcttgctctctctctccccccctctccgctcgctcacgacacaggtctcgctcgcgagcaagcgcacggagaagaatcgaatcgaagccatcccgtgaggggagagagagagagagagagaggggagggagagagggaggaggaggagagagaaaaaagtggggagaggccgtaccctagggtttcggtcgccggcgaggaggcccgccccgcccgccgccgccggggggccgcggcgcctaagctgaggtaaccgccgccccgttgctgctgctgtttctgcttctgcggccgcggggctagggttttcgcgcggaaattcgggggcttccgcggcggggcgccccggatctggcggggctggcgtgctgtcgggggcgctcctcgcgggaattgcgggctccggggccgccgcattgcggggggttggtggaattgtgggggtgcgcttcctgtgcgcgcggaggctgctgcctccgacggttggactggctgctgggaggtgcggatttctgaggagatgttctttctggcgtgtttggagtgctgcgggggcggaagatggttgaggttttagtgggatttggcttataggtcgcgatggctgctcgtcctctagcctatattaggccgcttgcttaggaggattgtattggcgcgcggtgacagatttggtggccttttgggagggcatgcagcaaacggcttggtgaaatttagtgtgtttgtacagctcgcgatattctgggcatagagatttgatggttatgacgggcaatgaaggttggatctgtcctgacccagtagcatgcattctggatggtttaatctcaacctttggaacttacttcatgtttgggataaggctgggcataaaacggtctaggaacggtcggatttagtatgttttacgtggcaaaatggtctcctagataattgaagcctcagaatgcagttatttaatatccgttaacgtgtagtgtaaatgttggggcaggtgatattaatgttccttattctttaatttttagcgattcgtgctaaaaatctgattgtggtatattttctgtggccctgaaaatatttggttcaattattgaactcgaggtacctcaataaattttaactagtgaacctttatcgggttaccaccaaatttgctgtagatttagcaccctggctgaatggtttaactccagctggcaggctggtgcttttcaatcaacttgtttagtttattggttatccatttgaagggcttaatctgtagtgttgtatgcataaagaacaaatacatgggatttcttttttatctataccatatttagagggctatagcacctgggtgatgcacagaataaccctttttaggtagtgaagtttttagttgttagccgcacccaggctggtggcttcattaaaatgcattaagcttaagtttctcatcctcggtgcttaggtttggtaaggaaaaccccaaagccatgtccacattgggactttgggggtgtttgttgtatatagaatatatattgatctgttacatgtaaattgtagtggactgatttaggccaatattttgagaaaatattaccatatgcgttgaactcaacgtagtttgtcttaattaacttagtaattactactaatctggttgcctgcatacttagtgtcatttatgtatatttggtcttttgatcattggaccttgtatgttctaccttttagcaggtttgtttgagcctgtatacatgatatcagcttccagaaggtgattgcagagggggaggatggaagaggaggaacaccgcggggttgttcttgtttgcagcatctgcggtttcctcttcgctgtccttggccctctcagcttttggatcctatgggctgtgaactggaggccgtggaggctatataggtatgctcgagattaggcgtgcttctgttggcatctagcatttgcatctgtagtctgcgaggttgcattattaatcatacgttatgtttccataaatttcagccagcagagtgcatacaacaatgtagatttggtatcattatcactctaacaactgaaattatttattgtgtctttattatgctgctaatccaacaccacaccttatatattttaagcctgccattcatatgtagattatggaatacgatcatgtaattgtgtctaactacaatcacaagtagtgccctgaaaaacgttgatgtttttctattcttatatcttctatgcatatttgtttatgttgatttgttcctgatgttctgagagctggattatctcattaagctactaacattttcgttcttgttttgttactcagttggatatatgcaaggaaatggccagcatatgtgcaaggacctcaactaagcacactgtgcagctttttcactctttttgcatggcttgtcgtcgtttctccaataacagttttgttagtatggggaggcatccttattgctcttttggaaaggaacataattgggctagctgttataatggtcggtgttgctttgcttctgtcattctactctataatgttgtggtggagaacgcaatggcaaagctccagtaagttttctactgtttacatgcttttattttctaggacattttgtgatgactactcaatgtgcttgtacttagggtcatggtttcattaaaccaaatattctgataagtggctgtttattcatgacttctaagtcatgggttcattaaatttgatattctaataggcgatgattgtctaggacttctctgcttattttgggggtccaatttgtttctagacaattgtaactaggaaatggtataaatggaacattttggcatactcaaaggaaaacttttaaagcttcacggaggattaaaaatactagtatgctactacaaatttgaacttttctcactttataaaactgcaatttctaactctttgattcatgtggtattttgtatgtgctgtttctgcaaaattgggccgctctatcatctcattgttctttattaatatcttactgatgttaacaaatgttggttgttgcagaggctgttgcttatcttctactcctggcagtcggtctactgtgcgcttatgagttttgtgctgtttatgttacaaccggtgctagtgcttctgagctcaattccccatctggcttcttctttggggtatctgcaatttcattggccataaatatgctttttataagtaaaatactgttcaatggtaaaattcttatccgttatctttatttgctgaatttcttatcacctgtaaataaaaaatttgagaaacataacttttcatacattacatgtacaggaagtggattcgatgttgatgagtatgtccgaaggttgtacaaatttgcatattctgattgtgttgaagtggcccctgtttcatgctcgcctgacccaccagatcctagtgagttatacatgacaaaatccagcaggtgacttcactaccttttcctctcttaaatactacataggcatatatgttccccaagtaacgtgcttgttctattatgctgttactggggtaagcaataatttctagtagttttggtaacatatcaatgccttaaaatgcagggtcttgcatctagggcttctttacctttgctcattgatggttcttgttgtctattccatcttatatggtctgacatcaaaagaagcacgctggctgggtgctttaacttcagttgcagtagtgattctcggtaatgatttggccttgtatctctaattgtgcatgatgtatctatttctttgacatcttattttcttttctacagactggaatttgggcctgtgttcatttaggtttgagcttcttaaaagtcggatgatagcgctatttgtagctggaacatcaagggttttccttatatgctttggggtgcactactggtttgtattcatctttatgcttttatagttgaacatatttatgatctagtactttgtgtttactaattaatgtgttacattaggtaccttggacattgcatcagttatgcttttgtagcatctgtgcttttagctgcagctgtctcttgctggctttctatttcaaacccctcagttgcaaggatagatgcattaagaagcacagtgataaaactccgagaaggttttcgaaggaaggggcaaactagttcttcaaactcatcagatggctgtggatctagtgtgaagcgtagtagtggcagtgttgaagctggtcctcatggcaatgctactgattctatgtacagaagcaactcacaaagcgattgtgtcaattggaacaatgttccttttgatcgatcgaatagttgtcaagaaggacagagctctgacaagaacatagatagtggacgtgccagtttagcccatcgcagtaattcgtgcctttctgctgtagctgtacaagaccctgaaactgctgtagtttcagcggacaggcatggggacccaactgcttcactcgttgtttgctctagtagtggtttggaaagtcaaggctgcgagtctagtggatcagctactgcctcgggtaatcagcagctattggatttgaacttggctgcaatttttcaggacagactgaatgatccaagaatcacatctatgctaaaaaggaatggtggactaggagatgtagaattggctaatcttcttcaggataaaggccttgatccaaatttttcctatatgatgaaagacaaggttatggacccacgaattttagctttgctgcagagaagcagcttagatgcagacagagagcatcaagatgatgtagatgtcactggtactgattcagataggttagatacaactattgcaaaccagatctcgctatcagaggaacttaggagaagtgggctagaaaattggctaaatctttcaaggctgatgtttcatcaagtagcaggttcaccaatacgtgcttttgttgtttttaccctaatattcatcatagaaacagttactgtggctgtccatcgaccgaagcccatcaaggttataaatgcaactcatgaacaggtaagtttgttgcaaagacagtataaaaactttgaaatgttgattgtgttgttaatcaagagtgtcctttttcgaatttggcagtttgagtttggtttctcgatactgcttctatcaccagttgtctgctccattatggcattcatttggtccctgtgtgcagaagagatgacgatgacatccaaacctcggaaggtgatgttgaacaaaagaaatatatttgtcgtattaataccaagcacttattttttaatcatggcaggacaagtccttttgcttcttcactagacatttagatatgttctgtcctccttaactcgtctacaaaatatcaaatctgattacaatgtgtgctttatcttactttgaccatgtagttgattttttttttcaaaatcttcgtggattttcagctatagtgacttttcctttcttttcccatctacagtatggcttcatcgcatggttgctgagtacttgtgttggtctacttctgtctttcttgaggtatacatgtttgttatttaatatttaaaacttcacttagttactactgcattttgccttgtgtaaatcctggagtactcatttgttttccttccctgctttggtgtcttgctggtttgactagaagtttcacatgggtatcaaatgatacatgcacagcataatagccatgtccacttgtttcgtatattctacacaagtacattttattgtataagtctgttactataatactgtgtctctgcctggttcatttgctacgccaccttgtgcttggaatctttttatattggtagaattgatcatgtgtgttattattagcattagtacgaataaatgtcatcgagtcattcttttgtttgttgcaaacaaaagagacctatctattttcatgaagataacctcaccacttgttatctgatcatggtacaattacttgttaagttctctatgcacagctcattttgagttgatgtacataaaattatactctgacgtgctttgcgctgctatatggtagtcttgtcttagacctcctttgggacagcttttagccagcttttgaacagaaaaaagctagcaaacttctcacacggctagctcatcccaggagttgctcacaaaaggaagcccattcatgaagacaaggagatctcatttccttgctcctccatggcttttgtgggatttgtttgagtaatttacccacctttgccatcatacccactgccagcgctcagcctgaaaactcttacttgatccccttccattccattagcctactcaaggtcctgatcatcgctggatccaccttgagctcctggttgccacggcctctaggtcccaatcgctaacgcagtaccgcctcaagctccctgtcgccgtcacctccacatcctagtcgccaccaccgccttgagctccccatctttgtcacctccaggtcttggtcaacaccaccatctagagttcctggtcactgctgcctctaagattccagtcatagctgctgcctcgagttcctagtatgcaaagttttagctttaagtggattactccttttatctggataaggtgtcctagcttgctaaaatgtgcttcttgattattctattgttcctgttttgacaattgacatattcacagcatcttgcatatgccttgtttatacatatgtatgactctctagccactagatttttataatcattgattcatttcattggggaagtacttacacttttgtctgaaatactacctctgccattctgcagcaagtcatcagttattttgggtttgtcactcacggtcccacttatggtggcttgtctctcatttgctattcccatatggatgcgtaacggttaccgtttctggattccgggaggggagcttgatagccgtgaaaatatccgccaagctccaggaaagaaagaggtttgttgtttttgttaattcagcagcaggacacccttttgtttatatatttggatatccaataaatgtctgtataagctatttgcgtagttgtaagggaagtactgtaaccagtatcatcttactatatggccttatgtcaatatactgttaacaacttctggatgaatgcctgaatatgtttactgaatcaattttcactgtattgttgtgattcctatcagcattagataaaatcttgttttgtaggctatcctactgaaaagaattcaggctctgttttacagcacatacctcttgacctctctaatgttattataaatagtgtagaacgcattcagaccttccagcattgttaatgattttcatgttactgatcgttgttatcttcttgtcagcgcgctctgtttgccatcagcataactgttttcactgcatcagtaattggccttggtgcaatagtatcagcaaaacctctagatgcattgggctacaagggatgggatgctgataaaaagagtttctattctccctatgcaacatcgatgtatcttggatgggcattatcatcaacgattgctgtacttgccactggggtgatacctattgtcgcttggtttgctacttatcgattttcaccttcatcagctatatgtgttggcctttttgcaagtatgttctactcttcttttccgttctcattgcatattaaatagagcacatcacacttttggataactggcacttgactggtgactttctgcagctgtccttgtatccttttgtggtgtgtcctactggggagtggtaaattcacgacaggatggagttcctctgaaggctgatttcctggcagctttacttccattactttgcattcctgctgtgttctcgttgtttactgggatgtataaatggtatggaaaattggaaaccatgtttattatttgtacgtccttgcatacttctgctcctctgagatgaaattgcaaataatttcaggaaggatgatgattggaagatttcccgtggagtttacctatttgttggcatgggagtgctgttattgcttggtgcaatatctgcagtaattgttacaattagaccttggactgtaagtaaagtttgtggcttggttttcaaaataaatttatcataatattcatttcatttgtgataagagacagcataattgatctgtcattgctatgcaggttggagttgcatgcctccttgtcatcttgttccttgtatttgctattggtgtcattcactactggacatctaacaatttctatttaacaaggacacaaatgttacttgtttgctcccttgcttttctccttgccttggctgctttcctgatgggcttatttcagggtgactacatcttcttatatgcttttcaacctgttattgctatttttctttctccgagttacataatagtttcccatattatgcacatagcttaaatcagctgatgattttttgcagagaaacctttcgttggggcatctataggttatttctcgtttctatttcttctcacaggaagagcattgactgtaagtttcatatcttttttcttaacttaagttagctacatgtttaagataatttctgttgaacatctcatgctagttttgctacttgtgagttatctcaagagttatgcttgtaatattgaatttactgtactcttctcaggtccttctatcaccaccaattgtcgtgtattcaccgagggtattacctgtttatgtttatgatgcccatgcagactctgctaaaaatgttaggtacggatatcaggatatggcctttctaattctacatgcttatatatctttcctttgaccaggattggtcataactcataacttctttcttctatgctatttttagaagtactattgtcatctgagcacacaccctaacattgctgtatttacagttatgccttccttatcttgtatgggattgcattggctactgaagtttggggtgtcattgccagtctaatattgaatccaccatttattggggctgctatttctgctatcactcttgtaattgccttcagttttgctgtttctcgaccatgcctgactctcaaggttagtatttctgtttatccaaaatcagcagattattgaaatgagctctctcttaggaaaatctaggatttgtcacccaaaaatatgcacttcagcacttgccagttgcaactccaccacatgtagccgctcacatcagtggcacattggttggcaaatcctgaagtgccaataccaatggcaataatacactcctttatttcctcttttttcttgatccttcttaaattaattgtgaaatttttgtcagatgctggaggacgctgttcactttctcagtaaggatacagttgtacaagcaatgtcacgttctgctaacaaagtaagtttgctgtatatttgtattattcagatattcaacatatccctgcgtaacataggtaaatgctgttcttgcttgcatacttttctgttaaacctgcctcagtaagcctaccacttagcatctagcgctgagatcagaactatgttttcttaatctagtgcatcaagttcaatcatgtatgttcccactccttgtcagccttgacacttacataagtgctgctggtgttatctactccaatatccaggaccagtacttatcaatgagattattatgactctgatttttattatttctgtattgttaatagtatgctttgtgtgcaatcagacgagaaatgctatttctgggacttactcggcgcctcagagatccgcaagttctgctgctcttttggttggagatcctgctattacgttggacagggctgggaattttgtgcttcctagggctgatgtcatgaagctgagagatcgtttaagaaatgaagaaattacggcaggatcgttcttttgtggagtgaagaattgtttaatgattggatcccctgtagatgtagattatcggaggaatatgtgtgcccatgcacgtattttggctttggaagaagcaattgatactgaatgggtttacatgtgggacaagtttggtggttatttacttcttctgcttggcttgactgccaaagctgagcaaatacaggtatgcatttgggactactcccacctaatcttttttgttcttaaaatctgtaacaatgttggaaatgtctgttgtttcaggatgaagttcgtcttagactttttctggacagcataggtctttctgacttaagtgccaaagaaatcaagaaatggatgcctgaagatcgaagacattttgaacttattcaagaaaggttattgttaaaacttttatgtatgcaatgtttctatctgcaaccctgtaaacctctgtgcccgccatctaaattctcttattcgcttattcagctacataagggaaaaagaaatggaagaggaggtcttgatgcaaaggcgcgaggaagaagggaagggaagggaaaggaggaaggcattgttggagagagaggaacgaaaatggaaggagcttgaaatatcactgctatcttctattcctaatgctggaagcagggatgctgcagccatggcagcagctgtcagagctgtgggtggtgattctgctctggaagattcttttgcaagggacagggtctcgtcaatagctcgtcacataagaaaggcacaattggctcggcgagcagagcaggttctgttactgttcctgtaatcattagattttatcaacttctaaagcacaccttaatgatgatatagttctcatggtgtaccttttgagtgcatgaactgaacatattcatctttggatatttattatctgtttttgccatccattttggagttggttatctgacaaagcatcaatttttgcatgacagttagttacgtgtaatagcctggaatcatttcttctgtttataaatttagtaccatatgttatacatgcagttcttgtaattacttttttactgatgctctttggatcttttacttgttacgaactgtgcagactggcattccagacactgtttgcatacttgatgatgaaccaaggagtactgggcgtcattgtggagagattgatttgtgtctttgtgaaagtaaaaaagttagcttctccattgcagtaatggtgcagccggtgtcaggtccagtctgtctttttggaacagaattccagaaaaaagtgtgctgggaaatcttggtggcagggtcagaacagggaatggaagctggccaagttggtcttcgattggtgactaagggtgaaaggatgacaaccgttgcaaaagagtggaatattggtgcatcaagtattgctgatggcaggtaccagctcgtgacaactgctgtttcttttgcatgaaaaaaaaagaatcaagagagccaacctgtttatgttcagattcacatcgaaatactagtcttacatggacttgtcgcatgtctttttgggtggaacatttcatcaacttttttttttcctggtaatgcctgactgtaaccaatgttaattttcaggtggcatcttgtcactgtgactatagatgctgatctaggtgaagcaacttctttcatagacggagtctacgatggatatcagaatgcgttgccattgcctagaaataatggcatctgggaacctgggacagatatttgggttggtgctaggccacccacggacttagatgcctttggtaggtcagacagcgagggatcagactcaaagatgcagatcatggatgcttttctatggggaagatgtctgactgaagatgaggttgctatgttgcatacagccatctgttctgctgaatatggcctttttgatcttgctgctgaggatgcttggcatggaagttattctgcaagggcaagttcttgtttcgaccaatctattcctactgtttatcttgcttttatttcattaattagaagggaacatgaaactcctaaggccttgttcgtttaatccccaatagtgagggattgagggggaatgattccacaacacaataggtgtggaacaaatcccctccaaatcctcttttgggagggattaaacgaacaaggcctgaacaattactcatttctacctttcttgagagccatgaaatggaagggattatgaagttatgcatgtgatattcatacatctaatattgtttcaacaggtggatgactgggaaagtgaagaagcaaattttgaactatatgatcaagaggacgttgaatgggatggacagtactccagtggtaggaaacgtcatgcgcgtgattctgtagctattgacattgactcctttgctagaagaccaaggaaaccaagatttgagacacgagaggaagtcaatcagcgcatgctttctgtcgaaagggctgttagagaggctcttattgcgaagggagagagaaattttactgatcaagagttccctccggatgatcgatctctgtttgtagatccgatgaacccatctctaaaattgcaggtactattgcatgcatttgtctaccacttgtacactaagaactggctgagtttctgacttgtgcactaagaattggcttggtctttgacattgatctgtcatctgtgtttctgagtttaggttgtctctgagtggatgaggccttctgatattgcgaaggaggtatctatcagttcacaaccgtgcttattttctggttctgtgaattcgtcagatgtgtgtcaggtacgcagattttgctttgtgctgatgtggggtcttcccctatactagaatttcaactttatacatttccatcttcctatacatgacacacaatccaatttgtccgattgttcttttcagggtcggttgggcgactgttggttcttgagcgctgttgcagttttgacagagatggcccgtatatctgaagttataatcactcctgagtataatgaagaagggatttacactgtcagattctgtatccaggtattcaatgatctgacccatctgtcctccattccattttcttgggttgttcctttggtaaagtatattggtagagcacaccatcttggtgagatttaacattttagtctcatacagagttaaatatcaaagttgaattggttaagcaaactaacagatttgtgagctgcaagttgattctctttgttactttgtgttcaacatatatcaacaagccattttcttctgcattgtgggaaagaagttctaatcagaaataatacaacagccacaagttactagagctatggtggatatgtgtgctacctaatagtgctgttagaggctcagtgaaaccttgacttgcagattttagtttggataaattccgctagttcgaaataattaatttggacaagttgatactacataaatacataaacagttgttagagctgtctaatatatatttatacataggcttacaacctatatgctttaattaagaaaaatgggattcatgactttagatttgctattcatattccatagggtgcatataagaatgccaacgtcttctgaaatgctaacattgcgagaccctagtaaggggcataccaccatgaagaacataatgcataccattatcttgctcgagttttagggaaattcccaaatggaatgacacaatatatacaattacacatgtgcattatgccctgcataaacaacattgaaaaccatgagtgaacaagtcactaatgcacaacttacatatgcagtatatgcttgtaaattttacgatgaaactcaaaggtaagttgataaaagtgaaataatagtataaatagctcatattcaccagaccttgtggattactccctccttcccaaattgatcatcatgtaatggaattcaaaatttctcaaattgatcatcatataaccgcatagacgcggattttatcagaatacaattaatgcagcatgggagaatgtgtgcatgctaggtgtaattggcatggtgttttgatcgatgcatgcattgtgggagaatgtgtgtatggtgtcttgattgatgtgatttaaattatccttggtcttggtgcacaaacatatatgatgatcattttgggaaggagggagtatttcccaccaacacaaaaaagacttgagattgtcctgtgaagaactatctttgaccagtttgatctgagcttatatttcaatgttctgtaaattactagggtgaatgggtggcagtggtggttgatgattggatcccctgtgagtctccggggaaaccggcatttgctactagtagaaagcaaaatgagctgtgggtatccattcttgaaaaagcttatgcaaagcttcatggctcttatgaggcattggagggtgggcttgtgcaagatgctctagtggatctcacaggaggagctggtgaagagattgacatgcggagcccccaagcgcagattgatcttgctagtggaagattgtggtctcagttgttgcattttaaacaagagggctttcttcttggtgctggaagtccttctggctcggatgctcatatttcatcaagtggcattgttcagggacatgcttactcaattttgcaggtttgctctgacttgtctgtatcttttggcaatcacttagttcccattctttttgcgctagacaaatttatattgtatgttacaggtaagagaagttgatggccataagctcgtgcaaattagaaatccgtgggcaaatgaagttgaatggaatggtccgtggtcagactcatcacaagagtggactgagcgaatgaagcacaaacttaagcatgttccacaggtacttgctcttctctgtgaccgtgtacttgaacagctggtattccactaattgtgattagaaagatacacaactgcgtcaaatttaatagatgaacccaccaaatactggttccttttagcatgataaaattgttggtctgttgcttatctcgttgactgtgctcttgagtgagcacactacagtttaatttaaaatagaatgagaaaaaaaccgatgtgttgattgtcacccctccagtttgttgatttcagcttaaggcattgtacctacaaaaacaaaatatattttcccaactttatttccgtgtgcagttttgaccctacccatatttgtttttgcagtcaaagaatggggtattctggatgtcttggcaagattttcagatccactttcggtcaatatatgtctgtcgtgtttatccacccgagatgcgttactctgtccatggccaatggcgtggttatagtgcaggtggttgccaagattatgactcatggcatcaaaatcctcagtaccggcttagagtaacaggacgggatgcactgtatcctgtacatgtatttattacccttacgcaggtatattccatcctgaatgttaatgtacttggagatttcactatgatgttgatataaacaaattccatgctttgccagggtgttggtttttctagaaagacaaatggtttccggaactatcaatctagccatgactcttctatgttttacattggaatgaggatactcaagacacggggctgccgtgctgcttacaatatctacatgcatgaatcagtgggtggaacagattatgttaactcaagggagatatcatgtgaattagtgttggagccttatccaaaaggatacacaattgtgcccacaaccatccatcctggagaggaagcaccttttgttttatcagtttttacaaaagcaccaatcaagctagaagctgtttaatgcaagattcatactagatgtgttcgctgctggtagctgtgccttgctgttgctggcccaggctcctttggggttcaagtgatgcagattccagctgtgggttcaagaggatcagataatggtaagtagatgatccttgtaaaacatttgagtagttccatgcttcctactcgatcagtgcaagagaatattgcagtgctactttaatgctttagtccggctccaaactggaattagtttttgcaaaaagcttgcctcggatgcaaataaagggattcagctaactgacctcgcaaccatttcaggtgtttgctgcagcaatatgccggtacctgggagatatgaagcagcagctctgctcttgaacctgaacattctgggcttcatcagacgctacatgcaaccgcataagcttgattgcttcctaacgtgacaggaaaggcaatctttctgtcagcaggcatggtgttgatacatcagaatcatttgatcgccgtgcatgactctggatgttttctagtcgatgcttgtagatagtggtggcaactaacatttagacctggtagccccatcccgtgtataggtatcccatgtcaccgtgtacatactatagaattagatgagttaaccttgtggtgtcgtttcctgttagcgaaatagagctcttgtgcagctgggaaataccattttagcatgctgcagttttgctgatcaaggcgagcagtcgtcggccatagcgttttcattgattgcctgtatgtaatcgaaatctgatctcattcaatggaagctattttttggtaccctttgaagcattgaagcctccttcatgatatacttgtgacgcagcaagtgcgactaatgaccagcatttattcaacattgctagaagttgaagacttgtgtaatcttgtcttcttgcttgtgctaaaagggtaagtgaagtaaccaggtaagcaaaggacgcagtcatgcaggcatagcactattcatccataccaccagtatggagattatgttacaagttgcaacatcgatggagtaaccacaataaactaaatgccctatatacgtacatcttgctaaaagcttgaattactcttaaaaaatacaatagtgagctaagacatgaaaattatgcacaaagaagttttatcaccacgtgttctagtacacggtttttgcttatgagagcagaactggctggtgaagactgaagaccgcaaaagcttgagctatgcttgccgtgtttgcattttgagagtaagggtccctttgaaatggaggattagcaaaggaattttgaaggatttattttcctaaggattttttcctatagagccctttgattcataggaagaggataggaaaacttccataggattgtattcctatgatcaattccataggaaaataagcaagaggttagacctcttgtgaaactttcctttgttgagtgtatcctgtggtgtaatcaaatggctcttctctccatttcctatgttttcaattcctgtaggattggaaaaacatacaacttcaattcctacgtttttcctattcctgtatttttcctatcctgcttttcaaaggggccctaagtttggtcttgtaggatggtgttttcggtgtgagccgtcgatgtgtatctctaaggcagagcttacgcctttgttttccaaaaacaagtttggtacattatctaaaaatagatggaattcttcaaaaatataaaaatgcactaagaccatatataggtaaatgccatgagctaccgtatcgcaaattgaaatgatccaagtgatctgttatcgataccgataagatctttgtcccattcaagtttgtgagcaagagtttgttccatcccaatgctcgcgccaaaagatctttccaaacagtacaaactacccaaaaagggaaaaaaaaagatgaaatcattgacatggtaagctcttgacttatcatgtttgccaaacagatcatcaaaaatattataagggcaagtataaagatagagaccggtacgttaattacattaattagagactatcacgtttacaatagttaaaacaatacggtctctaactattaatgtaccaaaatactttcttactagttatctttcctttattagacttaatgcaacaaaaaaaattctaataaatgttaagagtcgactctatgccgttgtcatgtgtagcaactatctttctctttccttcttcctctctctttcacgtcaccaaatatgcttgcatgacaataaaaagagaccgctaataaagaccattgtacatgccctaacaagactaaaaacaattaaggaaatagtcgctaacaggaaaaggtaatgggcatgggcggaatagaaagtcaaggagcattaagaaatttagcacatcagcacgctaagatttcatcaataacgaacaaaagggtgaagggggaatataattttatttttatttttagaccttttaatgttttaattttattaatagaccatttctaaaagtattttcaagaaatgaatctttcttttggtgcccaaataactctcacgccacacgcagccggtgtctgccacgcactgtagctggcatggccaaaccaccctgccactgccaggcaggcgtggccaaaaggtttatttcttaaaaatacttttagaaagtctattaataaaatcaaagcattaaaaggtctaaaaaataaaaaaaaatcgggggaatacatacatcgattaggatattgctagtgggcgggtgattgcttccctatcctcctagcgatcacctgtccttccccctatacgctcttcctctcccccttcctcctccccttcttctcttcctactacagtacaccataatttttttttaaaaaaataaagttgaaaaaatttatatatagaaatactatatataaaaaaattgaattcaaattaaaatttaaaatgtgtatgtaaacttttaacttataaaactttgggtctataaactatatttgaattcaaattcaaatttgaatcgggtatgtaaacttttgacttataaactttgggtctataaactgtaggtgtataaactttagatgtatagaaatactatatataaaaaatatttgaattcaaattcaaatttgaatcgggtatgtaaacttttgatttataaactttgggtctataaactttaggtgtataaactttagatgtatagaaatactatatataaaaagtatttgaattcaaattcaaatttgaatcggatatataaacttttgatttataaactttgggtctctaaactttagatatgtaaacttgaggtgtacaaactttaggtgcataaatttactaaaattgaaaagtaatgtggtgcaaaaaaggaaaccacgtggagaagaggggggcgcgctaggggcgatcgattgcccgttagctattttgcatcgattaggttacaatttccagatcaaatcccatgataacaagttatggatggtaaagtttaccatggtatttgacaatccatggccacggcatcgacattgtagttgtaccctcctcctccatctcttcgatcccatcaacaaagaactccctatctgtatcttacctacgcttggccctagccctagccgccatcatcacgaagccgtggaagcgccccacataaggggtgctccggtagtgaatgatcgcgccgcctccctctatcctctcgcacttcggctaaaactctgatctggtctagggttcttacccgtctgcagtctgcacttcctacaaatgtctgcttttttaggttaattatacccatgccattataaatttgtacctacggcagcgcgggatggggcatgggccggtggctggagtagcgctcggcggcttgggcgcatggcggcgagaccggtgccgctggtgcgaacgcttggcgtcgcgggagcggtgaatggatcgatcgagggaaaatatgtatagcaagccacatgtgtagtgcaaatgaatcgaaaaatggatgctattcgtccaagtcatcacaactaaaaattttattcttagatttactcatgagtaatatttttactcagtgatgacgtggataaatcttagacgtacatattttgatccaacgatagtttctaagtttccatcatatatttttccatcgatcgatgtgtaataaaaacctcctttcatacaacatgtggggtcagggataaaaatgtccaacaacccgagaagaaaaaaaaaggaaaaaatggtatcaaaatagagcaatttgcaatactagttgcatattaaagaaaacgtacggattaggtggtaaataaccaaattgcgagtattaggtggtatttttatcaaatttctcttgaaaatttgtgacgtgcgctagatgcctgggtccccggtgaggcggcaaggagtgacaggtagtgtcatggcgggggatgtcgcggcgagaggctgtgcatttcctaggagaaatcgtgatgacaggtgaggtcgacacacacgagtagctgtaaggcaagcaggcaggcggaggtgaaggagatctggcaatgcacgctcatgtcgtacttgtactaacaggggatgctcttcagcttcctcaaccctagttaccgcagctgcggtggtgccatgtgcagcatgcatgcccgttgcctgtctgtcaccttctctaccatatgcatcggcaaaatcagctgaagatatcttgttttgcagcgtagtgacatagccggcggtaggaaaggtcttaatgggcaccaatccaaatcaattcatcaggtcgggttcactagaaatgagagagaggtaacagggaaaaacagagagacgagaacaaaatgacctaaatattatgatgaatgtattgagtaaccattaaattttaatagcataactataaatagatactccctccggttctaatttaattgacgttttagacataatcttacgtaccaaggaatgatttattatatgcctaatttctactttacccatattaaatgtgccggtgtgctaattggaatcaacaagttgtatatcctaggtggtttggaacctatcttcgagaaacgaagcactctgaagtaatgggatgcatgcatgcaggagcaagtaagttctttatatatagggctgtgtttagttacacatcaaaattggaagtttaaagaaattgtaacgatataatggaaaagttagaagtttatatgtgtaggaaagttcgatgtgatgaaaaagttgaaagtttaaagaaaaaagtttgaatctaaacagggcttaggcagagactaagggggtgtttagatacaggggtgtaaagttttgaagcgtcacatcgggtattatacagggtgtcgcatagggtgttcgggtactaataaaaaaaactaattagttcagtaaactgcgagatgaatttattaagcctaattaatctgtcattagcaaatgtttactgtagcaccacattgtcaaatcatagaacaattaggcttaaaagattcgtatcgtaaattagccgcaatttatgcaattagttatttttttagcttatatttaatacttcatgcatgtgttcaaacgttcgatgtgacatggtgttaaattttggagtgggatctaaacagggcctaaaacttcaaaaaaattgcatactttggtttctatcccaaaacgtcaacaatattagaattgtagggagggagtacatagtaatagtatttttaaaacctgtaaatttttaatatatgaattcaattaacccattttaatccaagggacctccaaatgcgtctcgccgtttatctggcaacccggcgatcccacacccgtacgtatagagtgatctgatctgcactgccgccgcccaagtaggtgaaggttatttatggaacgtcgccggccccctcccctcccctcccctgcacaccggtatcacgcattcacgcgtgccgccggcaccgggaccgctagctgcctactactcctatacgtactacccccacctgaccataatttacattgcgcctgcactgctacccgctgccttccaacgatctcgtggtttcctcctgctactagtagtttgttacagtaccaatgcaccaaactgctttccgtttccttggcacgatccatggctgcccgttagtcagtaggcagccgagttatttgcaccggcgcacacacgcaagtttcattctttttgcacgcatgcatttgacacgaggcagcaatgcagcatatgaccaatcagccagggcgacgacgccccccggctgccggcttctagctgctgctacagtgctacgggcacctcgtgtagagacgccacctgctgcctgccccgcgatcgtgtgtcgccgtaaacacgtcgtacggcggcgacgatgccccgtgccctctcccatctgccgcccgcgggcgtcgccgcgtcgcatcgcatcgcccgcggatcgatcgatcgatcgaccgccccaactccgctttcctcgcgcgcacggtagtagcaatcgtcgtctcggtctcgcgacgctaaccccgtctcgtgccggtatttatgtcctacacctcgcgcgccgccgccgcccacccccccccccccccccccccaacaacacccgacagcgcacgcgcgcggccgcgagccacctgcaaaagcgcgggagcgagagcgagacgcgctgctcggctaagagcaagtttaatattatagccacctactaactccaattcatatacagctaatctaataactcattcatacaatatttatataatacactattaatacctggtctcacctgtcatacacaccctgcatcttaaagtctgtgctatagctggctacaaatctatagcccgatgtttttctctcttcttatttatcttcttaaactatgtttacagctagcttatagtctgctattgtacctgttctaacccgcttaaaaaccccctaccaaatactggtgggcttggagccagcagcaaaagcccattattaacgggacgcacgcgcgcgcgcgcaggggacaagtcgagggagagctagctagcttagcttgcttggttgctttggaggtgtggcttgccatggcgagagcgttccgcgcggcctcgccgctgccgctgccgtcctccagctccagggcggccgcggcgagcggtggcaccggcggaggcggaggcgggaacttcccgtggctgagcaggaagcggctgggcgccaagccgccgtcgccgcagcggcgaggtggacaggagagggagggaggtggagatgaggcggcggggatggggacgacgacgagggccgcgcggttctccgcgacgtcgtccgcggagcctgctgaggtgcagtcgtcgtcgtcgtcgaggaagcgcgcggacgcgctggcgaggctgcgggcggcgttcctggcggcgatcacgcaccggcggcggcggcggcagctggggtcgagcctgacgggcaccatcttcgggcggcgccgcggccgcgttcacgtcgcgctgcagacggacacccgctcgccgccggtgctgctggtggagatggccgcctactccaccggcgcgctcgtcagggagatgtcctccggcctcgtccgcctcgcgctcgagtgcgagaagcaaccaatcaacccaggtacacacacacgcacacacacgaattaatcaaccttcatcctcttcagcgccggcgagcactaacaccacgacggccggcctgtcggccaccggcgacgttcgttgcgttgcaccatgtacaggcgagaagcggcgggcgctgctggaggagccgacgtggcgggcctactgcaacggccgaaagtgcggcttcgcggtgcgcagggagtgcggcgccgacgagtggagggttcttggcgccgtcgagccggtgtccgtcggcgccggcgttctccccgacgacgccgccgccgccgccgccgccgaggagggcgacctgatgtacatgcgcgcgaggttcgagcgggtggtcgggtcgagggactcggaggcgttctacatgatgaaccctgacggcagcggcggcccggagctcagcatctacctgctcagagtctgaccatggatcatactatcatggagcaaaatcgaaaagaaaaaatgagagaagaaatcatcttgatgtttgcaattaattgtacgtaatccatccatccatgcatgcatagtttggcttgtgttaattactttcttgggtttcatgtaatttgaagggtgtcaaggtgtgtacagtattactgatcacttggggggggcttaatatatcaatctggtaaacattggtgtgatgcactgatgctgctgtactatctgtttgtgagacatttcacgtctgtgtgcttcaggactaattcataatgtctttgctaatctatgctgaaactttggttcattggctgatggctaataaattcatgcatcttaaaaaatactatgcacttttatgcgttcaccttaccttagtccagtatataatactagtagctgacggccagttacaaggatgctcaataattttcagttaagtgtcactgtctactgaagatagtgttttgccgtcggaacactttattagctcattgaagagcatctcagagcaagtataatactatggaggaattacaactcatggccaaccaaaataagtaacagttttagtgtcagttgtgagataaacattctacttttaacttatctccattcatttctgttcttttgaaatgataaccaaattagtcaagcgtagccccgcgggcactaaaattcagaacctctctctatgcagatgatgcagcagtgttcctaaatccttcacgccaagaagtgcaaaccctattgggaatcctgaacaaattcggggatgccacgggcctgcaggtaaacacaacaaagagttcaatcacgccaattcgatgcaacgacatagatctccaagatatttctcaaaacttcgatgggcagctgggtgcttttccccaaacctaccttggactgcctcttactacggggaagttaaagcgggtccatttgcagccggtaatggacaaaatcagagcaaggatggggggctggaaaaacaagctggtttatcaaagcgggcggaaggttcttgtgcaatcagttctcaatgccattccaacctacttgctgaccgttcttaaaccaccaaaaggattcctaaatgatgttgacaaagcgcaacgaaaatttctttgggccggagaccaagaaagtttgggcggaaaatgtaaagtgaattggcagcaagtatgttctccgacaatacatggtggattgggcataccttgtttggagaagttctcacgatcgctgaggctacgttggctctggtatgagtggacaagcccggaaaaaaacatggataggaaccccgccgccctgtgatgacaccgatcgtgctctgtttgctgctgccaccaaagtatcggtcggagatggacgaaaggcgaaattttgggaatccaactggataggagatcagccgctgaaatacctagccccaaacctcttcaaacactccaaaaggaaaaacaggtcggttcttgaggcaataactaatgatgcttggatcgaagacatccgcggaggggtgacaatacagctgcttcaggaatatatatgcgtatgggaagtgctccacaacgcaggagaggtgatccatgaaggggctgaggacacaatcctctggaggtggtcggccagtggcttgtatacggcaaaatcagcatatgtcatgcagttcatgggcaaaacgttttcggattctgctgagcttgtatggaaacttgggcaccagggaaacacaaattcttcgcgtggctgctggcacaaaatagaatatggacggcagatcgtttgcaatgcaggggctggccaaataactatttctgccaactctgtttcagaaatctcgaaacggtatagcacctcttcatggagtgccccttcatgcagcaggtatggcgggacattggtcgcaaattcagaccgcaatgtttcctacatgtgaccacagacaacactctcctcaattggcagcgcgagcaaacagatgaggcagaaaagttgcaacagaaagggctacgttcagcagtcttgaccacgctttgggagatttggatggaaaggaataatcgcatcttcagagggaaagaatctacaccatcggcacttgctagcaagatcatagatgagcttcgtttgtgggaaatggcaggtgccaagggagtgaagtgtattatattaagagattaggcttttgttttttagggagtgcaggcaggaagaattcctccgggaacgtctcccctgccttctgttctgtacagtttctctcacttcttctataatataaaaccagcttgctgagttctttcaaaaaaaagaaaagataaccaaattagtacttggtcgtatttgtcctaaactatgaacaagtgatagcgaagtaaaccagatggtaagatacatatatcgcctttttctgcatcttcttttaattgggagcaagaagactgaaggtttactcacttgaagataacctgcaataaactacagagattttgatgtaccaaacctaacggatggaacctttaattagtagattcccatttccgaatcatgattgtccttgttatgaaaatgtaatgctatattattttgtctttgtttaaaccttctttatcatcatccgaactcactaagcataaccaatgattatcagcgcggccactctgcaaaaaaattaaacatagtaccaaattcgcaaatgacatctgaaaaatatttttggcagatcacaaaggcctgtactaagtgagatctctttcattacaaccaatgttttgcaactatatattccaaaccatggtcctccatcactaattaaatactctcaacaacgtgggaccaaaacatttctctctctaattttcttttgtcccaaagctaagacacaagtcacacaactgaaagtggccttagccatttgtttatctcataagcccacttattcctcatcattagggtttttaagagtggaactatcctttcccttttccttctgcctttcctcttcttttactacttctttcccttcatccatgccaactttattctcctgctgatctaaaaaaaaaaaaaactttattctcttgttggctgtgcaaaagcatcatggttcatggaccagggcggtggaccaggtctacccaggagcatggcccaatcaaatgaatactccctccgtcccataatatagcaacctagtatcggatgggatatttcatagtataatgaatctggacaggaggatgtctagattcattgtactataaaatgtcacatccagtactaggctgctatattatgggacagagagagtagacgtcatgaggaggcccaggttgctgtttgggccatactggagtgtgcactgtactgcactactgctgttacggccaggattttgctgcggcggagaggggaaagccgtcgcttgcacgccactccggctggccgggcggcggcggcgagctggtttttcggccggccgtggtggggggccaccgtggtgttgtgttgtgtttaggaacggaacgggaggggtggggacggcggtgagctggggaatggatgagccggccgcgcatgcgcggttgtcggattgacaaagaagttagttagctcacgcctttgtgagacagcatggtaaccccgtcggccgtcggtaaccggttttgaaaaaagtggatgaaaatttggatactcagtggcatattttttaagctgctaaacggtacgtttcgtggaaaaattttatatatgaaagttgctttaaaatatcagattaatctatttttttaatttgtaataattaaaactcaattaatcatatgttaatacaaccttgttttatgtaaaacactttatcttatcttcatcaggagaaaagaacaccacgaaacctttgaggagttggtttttgattattagttgcatgtaaagcgaggagcattagtatatgatttattgaatactaattattaaaaatttgcaaaatgaatttatttgattattttaaaagtaatttctatataggaagttttcacacgaaacatgttgtttattagtttgaaaaacttgctaacgaaatcaaggtattagcttatccaaaccgtagtttagaatgagcccttagtatcaatgacgtagtgctaagaaaaaagcggcaatattcttttgcactcacatgcacactgtgcacaccctcataaggtatgcatacatactatccctacgtgtttatgctaaatgtaggagttgaatccggatggacagatcccactaaaaaaatctacacagttgagaatagctacattcactttgcaacaccggaattttcagtgaaacatgtattcaaaatcttggtacgatgcatctatgtacaatgaatgacaacttgcccaggctctgaaaatttctttggctccatgctaattaagctatgcgcctatctccaaatctccaatgtatcttcgaaaaaaaatgtcttttcaattggacaatctatcgcatattcgcatatatgagggcagcgggcagtatgcaacttgcaattttttgtaagcttaggtctccgaggacgcattataggcttttgtatgttcatccgagggggaaaggttctgcaacgagactgaaactacctacatctgcaaatgaaccgattgaaacaaaaggaagtgatgcttcaggatacagaaatcacagaggctcggaacagattatcatggccgaccgtgttagtgtccgaacctctaatcagggttaggcctcgcgtcatagcctagccacagcttaaagacaaaagcgctgctaagctaagctagtggcagtagccactgattaatctcatgacttttactggagtatctctttttcagaagtggaattctgcacatgcagggaacgtcatagcccgatgtccaatcctgcctcaggatttcacatacaaagagtggaaatattccagtattcccatcaagtttcactcatgatgtccttcacaaacattcactttgtacccttaaaattctaatgtccatttgtactaacacaattacaaatcatcctctacatgcaggtattataatactagtactaacctggtgtcttgattaccctaatctggtgctcatgaagtgaaaaggctgacgattctgctctccaggagacaaaagttggcaaattcataatactgaatactacacagtacgccaaaagaacaatggttaggacaagtactataggtatccaagtacaatcttctaaatgccatataagctaaaatagtgaggtggaggagagaagagatgagagagataagcagccacctctcatgcaagaggcaaccaccagacaaaattcaagacaaaaggagagaggataagagtagattgggcaaacaaacattggggctagtgtattagaattagtatagatgtgatatattgtacatgttacctctacatttattagttgatgatgtggtcaagattagatgcaacatccacctcttttataaaacttgcccttagggcaagtactatgggcatctaagcataagccccaagatgccacataggagtaaataatgaggtggaggagagaagaaatatgagagagaaatagttacctctcatacaaggggcaacccctacacaaacttcaataaacatgtgagagtgttagagatattggggattgtatgatagaggtaacctataatacatgttacctcttaatttaatgatatatgttatgcatgaaattggatgtggtagtcacctctactataaaacttgcccttataattacctgtagaactacaccttttagtacaagttgtacaagtatggtaatcgtctttcttcagaaagtgtgattcagttattagagcctgtgcacgactacatgggacctcaacccttggattaaggactaccttggaatgtgcagctaacttatccacagttcttaactaatagtttaatactgctgctgcttgagatgtctttggtttaacaagttagttcctcccaaaaggaaattctttaataagttgtcagttgccttccgagctggaagctcacaatcaaacctctaattattcgccattatatagtccacgattctcatttttaaacagcatagtcatagtgcgtcgtcacaacacattacatatccagccaccagcaatttactctgaacgaactctgaaatttcccctgaaaaaaagctctgaatttcagctcatctgacgacggcgacaagagggaaagggagatgaatttctcgagaaaaggtgtgcattgccatgacaagaagaggagaaagaatgttttgtggggcagggtgataaaatcttgcccggacactgaacttctgcgtgattgcttgtcgggggttcatggatggatagatggttacagtgtagccccttgaacagaccgagagatccaacctaagattccgctttgttcctaaaggcaagcgaagcgtttagctcgtgtggatgtggggctagcaatgtttcacgagttttgagggcaatttcagtttcttgatattgttgatctttctttgcatgtttgaacttagaagaaaaaaaatcatttgacgcaacatatttccccacagtttgtgttcttttcctctcttttttttttaaaaaaaaatgcaccgaagacacactaacacctaccatatgcagcggatctagtgactgcggtgtgtttggatgtggttgcggcatgtctacatttggagaaggtggtcaagtagttttttacctagggatatgaatgacgatctagtcgtaaggattggtggctcttaatactccgaccttttgaaggagggggccaaggagttgttcatgggtgacgatttagtctttgaattgatggccctcaatagcactcgactatttagttacattttaattctcaattaatagaaaaaacccttgaatcgacaccattcatccatctatctctggatccgggctcgcctccactcattcctcgttctagactgttgcctttgcaggggctggtctttttctaagaaatctctagccaaccttcccacaagaagttttttcttaacaccaatgaattttattaatgctagaggaaaatgatagctccaagaatttctttattctcaacgctctatgtcattttttttctttttgagtgtggttttatatgctcggctttgtgcattttagtaatgcaaaggctgaaagtgttctaaaaaaattatatcaccttaatcttaatgtaattgactgagttcaaaaaaaacttacattatctttaagaaaaaaacaggttgtctctaacacatccttaaaaagattctatagtgggtgcagtcccacatccacgatttcattatcgcgttattagtgttgacctctagcctatgttactttgtgtgttttgttgggtcttttatttattcatatcaaacatagggtggtcttatagagcaaagcacaaattataaagattagtgcaatgaaactgcatgtgatcccaattcgtgcaatgatgcaaaggaaacgaatttagaattccaacgtgtggatgtggtgtttcccaacagagtgattatcacgcgagaggaagacacgtacgaaaacaatatcatcacggttttatgcaggctaagctacacagagccacataaaattaatggccgttaatatcacaaattcacaaggtcgctttgtgttcattcagctcgcaggtttgctggattatagttgagcagagaactggaggatatgtgaaacaaacgaattacgtgctcaacatcacttcagtccaaacagccttgaaggctataaatcgtactcagacagtcgattttactggtatccaaatacccaactgcaaaactttgccagttgataagtatcacgtgacataatattatatatttacgcagtgaagccaaacataggcgtctaaaagacaatccatttccattaagcaaaaaaaagagacttgtgttaactattgttgggttcatcgagaactgatatttcaacgtacatatatacaacagccagatttcattattttgatcaccttcataatttatatataccaacgtaccaagcacccaatggaattatggaaaccagtgcaatgctttctatggcagttgtcgtatgaggtgaccactgaatcgccggtatctcacatgacctcgtcttcttgtacgtagaggccaccgtccgtctcgatgggcatagaaggcggggttccaggaggaatgcaggcagccccgttagggcctgcctgatcacataatgcctccgcgtcctgaattgcccggtcaagatttatctcgccactgagctcattgatgaacttgagaagggtgtcgaaatccatctgctctcctattatccgcgaccggtaccttttcaggatcgcgacgcataagtagaggtggaaatgttctgaccaataatgtgtccacagaacttcccacagcagcatgatttgatcgaaactgaactccctgcaatccataagaaattggagtaacttaattagactattagaggggatggagtgcaggctgcattttcctctacaagtgcttgggtggggagtactgcattaatgatgcagtgtaaaatttcttagcaaactaatgtaattaaaatcgtatagtagatagcagaagataattaacttctagacaagttaccactggtgctggtattgcaggttaacccaggtttgaattcatgtcaaaagtttacaggtttcagttgagcaccagctcataagcagtttgttgttaataaaggtaggaatagctcataaactttcaaaattgttgcgcgatgattgatgccattggaccaaccgaccaactaataaggtaacttgaaggtactggtcctactagcctgtggtttttacccgatatacgtgacagcagcgtactatcatacagtctgtatacagcccaacaggtgtgaacaatgaaacatgcttctaggcaaaatctttggtgaaaatccgtgtcactaattcttagacacaaaatgcacctccattttcgggagaacattttggaggaattagatttgcttaatgtagctaaatattggagctacagagaatttcattaattcatcatctagatttcaatattttttatggattctatataagataatgggctctgcagggaactagaacatagcaatatagtgttacaaagctaaagacgaaaacttagattttctgtttaaggtgcaaaatgcatacaactcaaatagggaaagatagaaatattaccttttgaattgtataagaacccaacgaaaacagaaaaagtagtttaagcagtcgttcttccgaaaatagttatgtaactgaggatcaagaagctccacgagctgcatgaggtacatagaaaatttcacataaatttagtattgtgcagtcacaaaaagtataatactcctatattgataaaagtagttattctgacacctaagctggcagtgtttgtcagacacatttgtataatggataatcataacatggtaaggattgaaggcagtaataaggaataatgaaaagttatgaaaactaaagaggggattttttttatgccgtttaagaagtataaacatgaactgcttgtcacttgaacatttttttacaatctatataatatgtatttttggcataatatcgaaggccacatcgcatgattgaaggcaattaatgaagccatataacaaatgatacacacataatcaatcgatatgacttaagcacaacggttttgcaagatttgcacaggatatgcggattaacaaaaattctattgtgatactatgatactgcttatctactcgaagaatggaaaattctaaaataccttggataatgcaagtaactgagcatgcatgccattctgatcacggttaaaattggctcctagtcgttccatcaaaattgcaaagcaccaaaatgactcagactcatcctccatcacataaagtataggtgccagaaaatcactcattccctggaagaaagagcgctcgctgcatgagcaaacaaacaaagaaacctagacaacgaaatttcatgctttataggtctaaatatttagtgtagcatgattaaccctgtcacttgtaataatatggctacaaaacaaatgaatattctgcagtgccttgtgattcagcatgtatacattccttatatttaacaagaatcagggttatgtgatctagtggaagctttctagcaaatgcagtgtttttcacttaaatgacttaaactggcaggcagttttcttcatcagctgatgttggataattgcgggtgaagggtaatagaacgtgcaaacttacttggcaatagccaaggtcgaaattatagaaggaatacgtcaacaggatatcccgtagcacaagaacattttgattgtcatctccttcataatatggaactgatctatctgtcctcaccttgatatccaaaaaacagttaaaacaagtgatcagtttggatatcagttaaaaataaaaagtggtcagagaggaagctaaaatggaaataaggaggaaaagttcagatagaaaaaaaagtagacaaattcataccacatctttgtcgataaggccttttctttccctaaacttggtaaatcttttagcttgtgtggacgaaatactctgcaaataatatatcaagaagaatcatgattcatgaatagtcatgtaaaagatgagtaatgtatgccataatgtaaaagaatcatgaattgttgttatgacgaacagctgaaagtgtcttaacatttgtaatgttactactgcaaactatcagcatgatcttagggataaagagaacagcaaatggataatcatatgtccagaaacattgctcccatcaagcaaaatcacataccgcagatctaacaaaactgagcaaaagcaaatgacagtctacatcacttgagctctactttaaaaatatactcaatatatatggtagtagcatgtcctagccagcattaataagcacactgaattgcagcacattgaacctatgaaccttgactgaccttccactgggattttatggcttcatattctgttcttttcatgacagcaagatattccctctcggcatatgttgaatcgtattcatgataccccaacaggaatttccagacctacatattaaacatcaaaactcatgtacaagaatgccttgttgagtggttatagcaaatcaaagttaagtataaaacctcttttctcagaacatggtcaatccctccatagaaaacctttttcctcagcgccttcgaatccataactctaccttcaggatctaagaaggatctccactgtgcaataaaaatttcagacaaacataagacgtttctgagaggaacagtggtacaacatgatcaatacatgataattattagatggttggtggagaagatccatgaaactaaagacattatgtgcagcgtaaactcatacagttcttaattaatgtaaaatgccagactaaatcttagccttccgttgagttgaagaaaaaggtcaaactaccatttggtaaaacaaatcttttcactaatggaagtgtgtgcagcacaatatttcatgtgtgtatccagcacaatgctcctctgcttgacatgatcagataactagatgtttactggataaaaggaataattttccatgtaactatccctttcaatctatttatacctccagaaaacaagttgttagtatcaaatatacagtatctgctaaaggctaattctcctgccaggagaagcatggcttgcaaattatgaggcaacagttcctgagttccactaaaatcctgcaggatttcttagcttgcttgaagccccaaggcatatgcctagagtctgagccaaagacataatgactccaagaaacaagaggtttaaatatcaaaggtcacaagattgaacagaagtatgactgtcttgaggatcataatactttactgtgatagtaaatacatccgaaatcaaatgttgaactcatccaattgtatgttagaggttagacaactgatgtatcttgtggattgagttacagatctagtaattatttgaactgcaacgctaagcagaataatagcacatggaattttagcaccatagagcacttgaacataaggggacagatatgtaaaataagtgctcagagaattcaatacctcatcaacactcaacggttgttctcttggttttccccacgctagaattttattagactgccaagatcaaggaaactgatgttacacacattgcagtatgcaaaattgtaatagctttggacagtaccaggggtcagaagaaaaaaactgactattttttatttaaaaaatctttttttttaagttttccaactaaagtgacaacaaatatgtgctaaataatacatagaagatacatctaatactacctctagtaatagaaaggaagttggcagataatggttttgaacatgagcagatgacagaagataatactagtttagcttaggtttcttctcattacagatggccttaatcctaattgtgaatatgaaattgtattttagttttactctctctgtatgtattacttattcttttatatatatcgcaggtgcatcccctactgttttcagacaaaaaaaattagaataaaaatgaattaaccataacagtaaaatttaaaggcttgtctccatgacttgtgagtgcttcaaaaagttgttctgttgttgctctcttccaaaatttgtagtggacgaataacaaagaacaatagaaaaaaagatatggttacctccattgaatctgacagcaaagaatccttatctggtgttatttgctgatctttgtacttatcatttgctctgttgtccaaaacatattcttgctgctgccttccataagtatgaccaccactactgtggttttcccgaaaaagacttgacgtggtatctcgtgcaaactttgtaaccagagaaaatttctccagtacttggatagaaagatcacgacccggatcattcgatctgtgcttttgctttgagacatattcagtcatgctagaagatgccccatgtttggcatcactcccatgtctggcttcatcaactgaactagtgaaactgagtgagttctgtcgtgacatggcatttgctacggtggcaacaccaggaagctccagtgatgacaaacttttctataaggcatcaaataaagtggatttgaggttcatgggtaagtaatcgttctaagttaaacttatgcaagacataggccagaacatggacttctaaacaaagatgactatatagctttacaagggactcctactaaaaggattgttttgcatattcccaaggacagtaaagtttctattgagggcatggtggtcttaaagaaattatgggtctggctacaagaaagtataataacatacctgtagaggatcttgaaagtcgttgacaagaaatacattaggatcatcgtccgaccttgagatagagtagagaaaatccaatcatatatgcagcaaaagatacttctgtaaacatttgattggttgtagtatgacactctaatgctccattacttaattagttttctgtaggctgagttactaaacgctcctagatatgttgaaatgtccagtgaagcatcttcccaagtgtaggttaattagatcataaatattaaatatttatgacagtatcctatcatatagaaggaaaaaaaagtgctttgaaaatccagttatggatatacttggtagatttgttgtatgtagatttcacttatagtccactcataatccagatagcaatttttgcatttccaggaatgagcaatttaggcactaacaaacaagggacagcttgactaattatttaattagagtgaacccagaaagaaaacctgataataaaaacatgcttctttagtgtcgcaaacaattcacgaagcccaccattgtagaaatagaatggaggaaaagccaatcctgcaaaacttgaaaagatacatcaatacaataaatcattttttttcatttttgtcagcatgtgtattatgtagctagaagaagcagaaatgcaatgagcctgtaagataaagtacctaaaagctaatgtgatcagtgatcaccgtgactatagaaattccaaaaagtttcaaactaaccacaagaaagcaaacaactagaagagcacttcacctgatgagagaacaatgattatgtactcgaatccaaatgtcggggtgtgcttacggatgaagcgtacatcacttaatggcaaggcctttatagtgtacaggtttctatctgtacatagtcaggcaagtaaagaaagagtcaagtgtaatcactgctgcacttcaattaccaagtatgacaaaagaaatatattgtgttgttcctacatttttctatttccatggtagctgaattgcttgataaagaatcaactccctcatttggctcccaactctgtcacacagatttgaacaaagacataagcaaatgaagaagaaaattaagcaacttgggtaccaatatgataacatgtcatgtgtaacaaaaccatattcaggtgccaaccaacaacaatcatatggattttcaatttcagttctcttgttctaatatcagacatttagcagaaaatgtggaaggaacgtctatgcaggaatagtagcatattgtatcattagcatatatggagtacaatgataagcaaagatatataagccaaccaacatataattcaagtagcaacacgaatgccctggccatcaagccaaaaggaccatggttcaatcctcacagcaaatgtggtaacaataatatcaaaacctaccacaaattcatgaacaatcaacaattcagactaactggggttctaactcaccaggaacagggagccctgctgcaagtagaggcgcagcttcccgctgatccggccggagccatactgcgtcgggtggatcgtcacacgctccttctcgtacaccacatccaccttcgccgtctcgcccgacccttgatccaccagatcgctccgcatcgccttcgatcaccaaacaaacaccaaattcagttcacccaaccaaacgaacgtcaattcaatccaaattgggaactcaacataggctatcattcatcgccatccatagcacgcacacacccacccaaccaataaaaccaatcaatgtacggaggaagaggtgacagctgccgaactagttacgtgcggaactagagcactacccccgaaccccgatgccccaacaacatctgatgagcagcgggatcccaaatccccccaaaacctcccaacaaaaatcatcgacctaatcgagcgaattcgctcgcgccgcgaccgaatcgcgcgctcgcgtcgggagcaagcgaggcgaggcgaacggggaacggcaggaagcacacgagtggtgggggagagaggcgcaccgagtgactggaggacgcggcggcggcggcggcgtagtcggagtcgtcggagaggtcgtggaggtccggtgagcgcggggtcccagcctcggcggcggcggcggcggcggaggcttcttctcgacgcatcggcggagggtagggtctctgatcggcttctgtttggttaactcggatttaacagcaaatccgtcgaattatcatatagtaggctttttctcccgatgcaactctccgcacctgtacataagtagtactgcctgcttacgtctaaataaaattggacaatgaagcgattacaacaccatacgaaagtgctatacggagtcctataacctggtaagaatcatgggataatgagatatttaacacgtatttttattttattttattttattaacacgtataaatattggaacaatgcatatgtatttttaggcgtactcctgaggaattccccctggggttctttaggtattaaactgatttatatgaaaaatatttttttgtgagattttttgcgttccaaagtagccacaagaaacaaagctactagactgggacaccgagttgctctcaattgttttttttttgggcaaaagattggtgaagtactatgtgctttccttctggaaatactattcttttttagaaggtaaatatgatttgtttatgcaaaatttatggctggaaatacagacaattttttttatttagtatactgcaaggtgaagtcaagagaatttgtagttacttgtgggtatgacatacatgcatttgctttaggctagcgtagatacgccaaatgaaagtgagcacatgctgcaaacaaaccgtctcgaaagaaaaagaaaatatcacaacagaacagaacagcatgccttagggacaaaggcaaagagtccagcatagatattccttagccgcgtaagccagaagaccggcgattgcttgcatcgaagcagacgtccattggaaggcccagacagctgacgtatatacaagccaaaaatacactactcctgccaaatatagcaatttttaatctttaaaatttattttaaaatataatatttttttcactaacattctcttcccaactcgtggctctacgccgttcaattacaccatatatttccatttcgcatacaatcacaaacttactctatttaattctatctattatacttctcatccaatcacaacatctccatttaaatctacatatatttttttaataatcatgtttacccctaaaaatctggaatagaggtattactgggagggatggaggtagcactgataagacattgcacaagctgcacaactaccagtcaacagaagggccttctaattcaagaggcacaagaacatgctagacaatccggtcatctggacgagaaaaaggaaatgcttccagcgtcaacaaatgccacaaactttgcatgtaactgatcctggatgccactgttgagccccctatttcacaagctgaagaactgccagtcaacaaagtcctataattcaagatgcacaaagacatggaagacaatctggtcgtctggacgagaaaaaaaaaagcttcccgcgttgacaaatgccacaaacttcgcaaggtggtcaaccacgtaaactgatcctggaacaaaatgaacaacaattacaagcctcaacccttgacagttacaggcatcgcgccattgtacattctcaaaagctaacttctgtgagcgcccatcaaagctatgtctactacaaatatatttcaattacagggggagaacataattgaagtgggaaaatctactagtacatcatcatcatcaccaagcacacaacctagagttccaagaatggcatgtcatgaatcgaaaacagaaacgctagaaataacctattcagtagccctctgcaattgtcatgtagtgaagaaagaccatagctttttcccaattgattggttccgcctttcggagtcatcgtcctcctcatcatcctgttcagctccaagttcacttcctgatggtgtcataggcatcgcatctggtgctgcatctataccatccacaatatctaccccctctgcactagtgacctctacagggccatgtgtgtcaccagcttcagcctaacaagagcaagtttcgagttagctgtgatcctgaatgtatatgccacacaaacccaaaaagaaagcttggcctcaacccagaaaggcatgcatccaagatactgaaagcctttcaaagtattacataaaatacagaatagcaaacaatgcagaatggatcttacctgcgagtactcgggtaattgagatgcatcatcagctgattgggaggcccctttgctcccagtggcaggttcctcagcctttgaggttccttctgtgtcatctgcggtagcctctactgtctgtttacttccctttttcgcagctttctttttgttggtttgggctgcagttgccgcatttgcactttccaacaaaataaagcaaaaaggaaatcaatttactccacaagtcagttaaaaaaaggatgataaccttgagtagaaattaaacgtgggataaatacagaaacttacactgtggtgcgcctgaggttgtagcgtttttctcctggggcttgcgtaactgctgcagctgtttggcgcctcttgcggcgctgccctccaagtgaaacactttcagaatgagcttcactgtcctcatcttgctcactgattgtggctccagcaaagcgccgcttccgtgtaccacccacagtaactgaatctccctggccatcatccttttttacttctaaattctcaccaagtatttctttagcatcttcaactaccgcaagaacagaccgtgtccgttttacaccaccttttgctctacccttcctgttttgttggcgccgtccttgttttgatgtttcaggctccaaatctacaacgggaagcactgccgagtccttcccgttttggtcaacatccacaatagttgtgtccaccaccatgtccgtgttgccatcaaatgattgagttccatgaatatctacacaattatctgcaactccaagagaagactccatctggacgtcatctgctatatcttgcctttcagattcttcattctcaaatgccccactctcagatgggagatcctcagcatcaaatgagttataggctacctgatagacaggagttggctcataatcatcatcgctctgcgatgcttcctctagtcttgcaccaaagtctgtgttcttcactgcttgctgttcagatgattgctcagccttcttcctaggagaaaacttgaaaatccttgaacacttctgcaacaatgataaacggccacctgaattaacaagtgctccggtctcttgggctaaggtgtcaggattgggggaacgatcatccgcctcaacagcaagactaggatattctatatcagtgctatctttaagagctagggcatccaagccctcaaaaataataaccccgcaatttttgcacaccttgtacttttcaaatatatcgatgaggttattcctgtccctgttatatgcttctctacgctctttcagactcttgctgagagtgttcagactatcaatgtcccttctgatatctgccttgtcagtttccagtttttgcctatcctccacaagaacttccttttccttctgcagctgttttttctccaatagtatcttctgaatctttgattcattcaattcggctgcacgtttgagctcattttctacaaagtccatcttcctatttaactcattttccttctcttcaagttctctctctttgctcgcttgttttttctccatctccatctccaattcatgccgatggagctgcaaatttcgttgaagatcagcacgctctctctttagcaattcctcattttccaaacgctgatggtctatattatcgatcaaggatttttccttaagtgcgagattttccccctgctccttgtattttatgtccaactcatcctctctatcctttagccttttttcttcattgtcatgccacctttctagattcttcttttcattgttcagtttcttggcttcctcttccaagtgagttcttttttcatccagctgctcccactcttcttcaaatttctgacgctgcttcctcaaatcttcagtttcctcagaaagagagttgcttcgcattctgtattcatcaatctctttcttcagttgtgctgtaagcatgatgtgctcttgcctctcttcctctgtaagtttcaaattgttctgctcttgcaatattttctccttttcagcaaccactgtggctttcaaactctcaagctccaatttgtacatctcagcctgctttctttcattttcaatctgcagcttttgttccgataactgtttctcatcattttgtagtgattcctcccacttcttcagagcattcgattttgtatcaagatcattttgccattcttccaattttttcttactttcatttaatacttgttcttttttcgaaagcttctcctccgaagatctgacatctttttccctctgcaccaaatcagcttccttctgtaccaacattgcatcaaatgatttcttctcattctccagttgtaaatcaaaatctcgtcttttggattcaagcttcacattatgatcttcaagaagcttctgaagcccaacctgcaacagaattggttggtacaattatatgaaagagtatagtatatttatttaggagtcattgcaacacacggacatgatgctacttatattgaaagaagagatcacaaaagagataaaagcaccaattgataagcaactttatgcaatagtgaatgcataaaacagggaacaagctgaataacagagaacataaaacatcaaacccacatatttaacacaaaatcgagtttaccaaacggtacctagaacaaaacacaaccaacaatccaacatggtctagacattgctatcaagtgtataactatattgaagaagaaacacaatattagcctatcatacttactttttcccttgcactgactttttcttccctttcagctatttttttctctctttcttctaatttcctgttctttgattcagcttcctataatcgaatagaaacaggatatgtattttaattccactatcaatttgtaataatgtgaaatgaggataaaggaaaaggcattcagtgatatatggattaccttttcttgtaaatgtaattcagctagtcgtttgttaatgtcgtcctctttaattttgagtgtagctttagtatgctccagagctttttttgcttcctccaactcttcttgctttatcttgaaaagtttgtcattctcgtttgctctctcctctcgatcatttagggatctctgcaaatcaagaattctattctgactttccttaagctttttgtcccagtcacgtaatgaatcctcctgacgcttgatccggtcctcccctgccttcctcctaaacatatcaatgacatacaataatcaattgcttggcacagtagagagcacacagacaaaggaaaacgggcaagaatgccatactcattttcaaaatatagcttctccttctccagcctacgctgacgagcttctacctcctctaaatccctgtcagcctgagatttcttacggtttgcctcagcaagcttcgcatctgcagcatgaagcttaccctcgatctccaaccttttttcctccaaactagcctcaagggattgagcatcagttatctttttctcagacataaacttaacctcggctatctctccacgaatttcacgcagtgccttttcgagctgcaaagttcagaaatatgaagtgataagaaacaagaatgaagcgttcaaaagtacatggtccgaaggctaaaggactgcagatgacaagtgctgtgtgctcagatacatagaacttttgttaaacataaacataaggacaatgcagtgttaaaaactattggctggagaaaccataacctagaaattattcaaccaattcatttgaccattagatattattacatcatgattcatgactgtgataaaatttacatatcaccagtatatgatatcaccagtatatgcagtatagtattcaaaaaactgcttagtcatcaacagttaacagcattacgaatattaggaaatactgataaacagcaagagtaagaaattattagagaataacatacatctgttacgcattgcttctcaacacccaatgctttccgcatgctttcctcccgcctttcgtattctgatatggcattcaaatgggcagcttgttcccgctttaaaatctcttctttctgtgtcagcgcttgattgatttcatcaagtttggctgtccactcttttttctcaatcaaaagcagccccatattgtactgatattcatgtaactgcggacatgaacacaaaagaaaataactactaatggtatgatcaaacaagaaaatggatgtgcaactgtagtaaatatgatttaggaagccagcgtgagagagataagaactgaagaaaaatatatattagatcgaatgcttataatggaacatagaagtcaatcacataaaacattccaccttccgtaggtatttgcatgcctaactacttgttacagtagtttctacaagcctattttatattcaaataatagattaacatgactgaagagttattaaaaggacataagaatgacaccaatgtaatgtagcaccctaggcagcgctctgtttcttaagcagttcataagaaaccacgttatttaaatcattagcaagtgcagaaatggcctcgcacaaataaatgaaaattggaatgttcaaatgatttacggttcaaaatgaaatcacgaggcacactaatattttttttcactcaatttcactgcttccacttctcatcgactgatagcatgccatgaaaaaccgcacattgcatttggtgagcaaagaaacatggccctagattggaattcaaaagctacatccacgaacagaaagaaaagccaggatttgggttaaaaaaaaacacctcttgttccagttcggcgacccgcagagtagtccctttccccttgccaaggggcgccgacgcggcgggagcgccgccaccgctccgctggttcgccggagccggcgtcgaccacccggtccaccccttcccctgcggagtaaacatcacgccttcttcctcccaatttcctcacggctcatccaataaacgaaccgccctctccctccctgcaattccgaacaaagaaacacccaaatcaccaaccgaagctccatctgaccaaaaaccctagccaccatgaaaaaaccccaccaacgaaaccctaattcccgccaaccccaagaaccgcaagaaacccccccccccccccgcattaccaagaaccaagaaacctcccaccgaaaagctcccgaatttgaaatcctccccccccccccacccaaggcagaaaccccctctcctcagaaatcccaaaccaaaccgcaagaaaaaaacagcccgcctctccccacaaaaaaagaaccgcgcggatctgcgcgggcgggcactcaccgggggtggggagtctccccgcccgctcgcggcggcgcggcgaagccgaagaggtggcgcggcgacctggctctggctcgggcgtgggttggtgcgtcgtgcggctagatttgggaaaggctgcgggacagcgggggaggagagagagagaggggaagaggaggagagagggagcgtggggggtagaggggtaatttcacgtggggcggctggctgaaaagcggtggcgcttcgcgaggggagcgtgcggtgcggcaaatgaccacggtaccccccctcgtccctggacggccgctttttgatgacgtgatgatcattttgagtgtccgaactggtctcctctcattggactattattttgacagagatactccctccggttttattttaatttatgttttggacaataacacggtctacaaaatatatctttgatcttatttttctattataatatatacaataaataaatatatgtttacttttattatagtgctttaaagataaatatatatatgttgttctagtttctttaaactaaatatttttaaagttattgatgatcaaatttataaaaatttgacctgaaacttgtccaaagcgttaattattatagaaccagaggtagtactggactagcattggccattttataggtttaacgactagtagtacactatgcaatgcagcagcctgagtggctggcactggagggcctaaactttctacgtgtgcaaaataatccgtgttaaaggagctttattattggttgattctgggcgttgctagaaaatcaggaaactttaggaacgtgttaacaaggtggtatgtcttttttagttcttcagtttctgcacaacactgtttttttacttcctctaatggaaccaaaatgatcgggtacaagctaaaaaaatgtgggttgtctacaatagtggatctgcatgccatggagaccacgggtctcaagcccttattatcagcgttaaaattataggagtttccattaaaccgtctatcttttttttttgccatatactccctcgtttcaggttataagacgttttaactttggtcaaagttaaactgctttacgtttgaccaagtttattgaaaaaaagtagaaacattttcaacccaagacaattttattatgaaaatatattcaattattgatttgatgaaattattttaatattataaatattactatatttgtctacaaacttagttaaatttaaaacagtttgattttgacaaaagttaaaatatcttatagtctgaaacggagggagtatttacttaaaaaaaggaggctataactttggacagattgtttagcccctcatgctagtcttacttgatcctccgcccctagtcgtttatctgttaatagatttgaaccctacttgtacatatgtgagtgcattttattatcatcggtattgtgtgtattgcccgtatgtgatgatgtgtatcagcatatgtaatcagagaaaacaatctattatacactagtatagtcgattttgtgtgatggtcttctctcctctcgaagataaacaaatattatactcacattttatatttttatgtgccgagatatacatagacgctcacacttacataatactaatttaatactagttgataacagttgttttcttaacaaattgaagagagtaaacctataccttatctgtctccgaaataaacgaatctataatggtgtgtgatattatctagtggagtataacaaatctatacatatgtaatgtcacgaaacaaggttattttattttttaatagaaggtctataaatttatagtgacaccgtgaccagtcgcgtcattttcaatcctcaggtttacgtaccaaacaaacattacccttctacctggcaaacaaaataccgaatacttataagcaagtacaatggctgacttgcttggtttgtacgccgtcctgtctttatttaagcccccaggcgaagccatacaaaagtttttccatgtcacaatcttaggtaaccaactctaagtctctaacacctcattgccgatttactagattataagttgactaaagcaagaaaagtttgattgaattaagatatgcaggagaacactaaaagtaggttaagcaaacacacaagatatatacaaagacgtcttgtttgtcacgaccttggctggtcgaccaaatcagtttttggctttcagttgcccaagaaaacatgaagcagttaaacgtaacataagctttcacccaatcgagtgatgacgcagctttgcagataattccggtgaaatgctttgtccaggcgagggcagttacgtaaaatcgcgtgccagagtttcgtcatgggacgagctgtcgcctgttgggattggggggtttcgaatattcgctatgcgtagcgcgacgggataaaatatgctaaatgcaccccgctccccagtccccaccgcgatgtacgtggctgacgtatggggccacccgggaattaatggccacatgtatggcgcgcggcggcggcgcggcctctcgttttctttcgttctctcttacggtggagttattttctactgaaaataaagatgaaaataaagattaagttttttacgcaaaacatatgattgattgagtttaatttattacaaacttaaaaaatagattaatatgatattttagagcagctttcatatagaaagtgttcacacgaaacacatcgtttagcagtttaaaaaacgtgccataaaaatgttaatttttatccaacttttgttaatttttatccaacttttgttggacaagagaacgggagttcccgttctctcttctttacagcgtagtacgccgaggcgccagggtgtgttgggaattttgtctcgggaggctgtacactgtacacggcgtaccgtatgcgcatcgtgtctcctcgatatgggtatctcttctctctctattctctctttgttattactagaaaagaaagaaaaagaaaatgcaacttgttttgtcgatctcgcttcatgttcatcaatcattctctgccagacattttttcctccatttggttttgtttaatgtcttgtgtttgtttgagagattaaaatttgcagcatatttcgctcgctttgatcaggctttcaaaaggcatgtggagttttatttttaaacttgaaaaggcatgtaaagttagcttgtgagatggtttgatgacaggcaactagacccaatcgctcaaactaatgctctcatcgtttaagttacggctgatatttgataagccatagaaaaggagcaaaacaaccaacacatattttataaaaacttttatattatgttattagcggtttaaaattcattgctgggaaaaatacagaaaaacataaaatcggctataaatttaaaattaaatttaaaatatttaaaattaagttgcatctgataaactaattagcagacaatgagaaagcttaaaaataagttagacttagacttttttaattgattagaaaaaatacccgtgcgttgcaacgggtgaagtatattttaatcttattattgttagatggtttagttaagatgaaattcactgtgagagctcgcttggatatatctctactattataaaagtttaacttatttttaccatgggtttttggtacgtcgtccctttccgtttcgcatttggacgcatgcgtttcaaacgttgtttcccattctgttccatgggagtagccttccctcccgttaattttttttctctctattacggtagttaagttaaaagatgctcttccattgatttcttttttgttctcttcgttaagttaaaacataccacctaatgcatttacggtcatgcatgcgacataatggtctcgtttggttttataactctatacctacttcaaaacatgtaaggcctccgatcgtccgtttcgtccgtcatcgtcgtgtaagtccaagtccgtcttttttaaaaaaaatccccgagcagatcagcctcccaacccctttgcccccaattcccaagaatcacagaatcactcaattgcaatcccaaatcaaaaccaagaatccccacaaaatcaacattccaaatcaaaaataaaatccaaatcctaaccctagccatctcccagagccaccctcctcgtggtcgtcgccgtcgtccgtcgtccgccgccgtcgccgccgttgtcggcatcgtagccttccactgtgaccggttcccaagcccgccgccgctcccgagcccaccaccgctcctggccacgtcgccacaccggggagggggagcaacagccaccgagcccacatgcggtcgccgtcgacgctaccaccgccgtaagatccgtcgcgggagggaggcgagaggagtcggagggagccgccgccgccggatctgtcctcggccgccaccaccgcggctggatccacccacggtcgtcgccgacaccaccgtcgccggatctgtcacgcgagggaggcgagggggagcggcaccaccggggagggaggagaggcgccgccggggagggggagaggcgccgccactgagggagagggagagggagggaggggaaatgtttttagggttagggtttggatcattgaacttttatataggtcgtgatcaatcaagaccgtccatcagatcggacggctcagcttctccagcgttcccaggctgcccacactattgggccgcttgtaatctcctcagagaatacatttactttatgtccctaaagtcgtccccgaatatgttctcaggccgcccacactgtagcccgcctcatgggccgcgtgcacgcacagaataagttcacttgaggtcccttaagttgaattgtttttatttcattaggaatagattttcttaaaaagctcatatcatgtaaaactaaaccctaatcatctaatacttttatatttggtataattttagtttacccgttgcaacgcacgggcattttttctagtatatatatatatatatatatatatatatatatatatatatatatagaaaatcatgagctgcagttaggagcctgatcatctcaagttagcatgcgagtttttcaaacatatttcttatatgattccttctgtattaccaaaagtaaacaatcttaaaaactgactcaaatacggatatgtatttccaaaagcaaacgaacttaaaaaccgactcatacacggatgacacgtaccaaaataccggcaaaaacatcttcaatttttataacagtagagaagagatatagattaaaaccaaatcataaaaattaaaaccgactcaaacacggatgacgaaccgcggaaacatcttcaatttttataaccgacttaaacatgaatgacggaccgcggaaacatcttcaatttttataatagcagagataattccatgatggtctaatacgtggaaataaagaacaagttcgcttcagctcgcatcaagaaacaaactgataaactgacgattctttttttaaaaaaataagctgaaattcaatcttcgacaaatttgttagatactattcacaaaaaccgtcaaaattgctgtggaggctagtgcagtatttggcgagcaaatgatttttgaaccctcacccgcacgtgcgtgtgcacacattaaatccttaattcctaagctcataagttgggagcacaaaattcaccactgaaggatttgaggtccaatgaccaacttgaaatcaggttttatctaataagaaaatgctcctaagcggttttacctgttttcatgaaaagcattgaaatctgatgaatttcaagtaagtcctgtaaaaaaaaattgaaatgcactttgaatttttcttatcagagcggtttatcagctcaaggtggctctaaacctaaaaattgtgccaaaaccgggaggttttcatcagttttatgagccctgcttggaatacatcaacaaatagagtaacatgtaagtttggtgccagtaccagcatacgtactacacttaaaaaaacataggctgtgttcggaactctaagttcccaacactctcctctcgtttttcgcgtgcatgtttttcaaactgttaaacggatcgtttttttataaaaagtttctatacgtaagttgcctaaaaaacatattgatctatttttgaaaaataaattagctaatacttaattaatcacgtgctaatggatcgctccgtttttcgtgcgcactattagagttgggaactcaggcatccgaacacagccatagtcactatggagtattataatttgtttgtatacagcgtgaataaaaatcacacaaacagaaccaacaaaccctgtccttttgagtacaactgtacaagaaacctttttctttctaggatgcgctatcgaacaacgccgacagatgcatagccaaacgtcagagagatgcaaaaaccgctgagcgagcagccaaatgacatgagctttttacaagcctgtctcacttatttggctctcaatctttttctccagatgactcggttgtctagttacactagctgttggtacgttgcaaacgagaaaggaaaggatccctgctccatgttggccacggcgatccccgtgacaacatttataaaattcaggtgaagaaaagaaagaaagaaagaacgaaaaaaaagggaaggatgacgaaccttttcgaactgtacgacagcgcgaacatcatgttcaacaggctgtctacaaaaagcagagaaaatgctttacgacgtggaatcagaataatggtatctcgatacaaggttgtcagcaaatgggagaaaataataaatggatcaatctgatagtacttgcctgccactctttgatgcctcctggtttttttggttgtgctactactgctctcgtttgattgtttctgttctttttggcttgcttcagattgatgatgggggcttgaatgctttgggttaagttgggtcccctgtgttttgctgcagatgccagatagtagcgtcatttgatgatgtgaatcagtcccttgggtgacatccaagatgtactgttgttcatggttaatgtaggggtatctagacctagattactgtatttcactcgatcacttaagtacagtacaagacatcaagtttataccatctgctaggagtagtactccttttttactcctagaaggtacaaaatgcacgcacgatttactgctaccaatcctgaggccatcgtcagtctcagcaactctgtagcctgtagtacttatttgtgttgtcttcctgtgaaacagtactactcctacatgtgtaccagacggccagacgcagacgagggcaagggctgtcaacgagctcgctcgagctcgtttgtctaggctcgaactcgatacaagctccagccgagtctataaaatattcgagctttctgacaagctcgactaccgagcttaatttttaagtaaaacaatatatatttcaaatataatcttttaaaaaacaattaatttctagtgcatcgtattaatagaagaggaaaaaagaataaaataaatatatgatattaatataaggcatacaaataacatatttgatctcataatttattaaataacaaaaaaatatatattactagactcgttggaagctcaagcttggctcgataaaactcgcgagcttaaggagaggctcaggcttagtttgtctgaagctcgagccgagcttgaatcgagcctagacgagccgagctcgagcagctcgcgagttttgagcatttttgacagccctcacgaggcgagtgcatgaattcttgttgcactgggctttgttcagttgagcttgttcgaattcttgttgggtccgtgcgtggaggtgggaggccttgacggacgagttcaaggcggcgagagtgacgttgcgagccaccgggcaggtgagttggcgacgaggaaaggcaacggtggcccagaacgcatggctaactggccggtcaacaaggcccagcgtgagagactttctagttgggcctgttaggattactgttaaataaacattttcaaaatttaacaaacaagttggtaatattgtcattcttttagaataggccaaatgtattgttgccaaaattctctaagcattaccaatatttggtaacaaactaaatacatccatatcttacctagtaaaagtgaatcacaaagtgcaatcaggatgagccacatcattcgttgaagccattgacattgccaacgtatgggatatttcacaaatgcatttggtcaaacttctagagataaattgaggtgctctttaatagtactagtagctatttgctctgaagggtgcattcgtttcctgctctttccaacgtttactcccttatttttacacaaacacttcctgaacttttccaatttctgctcctttatttttacacaaacacttcctgaacttctgaacaactcattgttaaaaatctcaaaaaagttactttaaaaaataatactaatatatttttaatttttaattaatacttaattagtgctaataactcgttccgttttatatgcgtggcaaaggtcccaaatgttccaaccgaacgcagcgcaaactgtctgcacctgcattgcaacggaaacaataacgactgtgtggaaaccccaattgtgcatgtagccgtagtggagtaataaaatagagaagctgccggactattattatatatgcaatttgtcttttattatatacttaaaaaaagcccatacgttgcaacaggtgaaggttattttaattttattattgatatatggtttaattaaggtgaaaatcactgtcgaaatttgcttggatatatatttctctaaaagatcatgaattcatgagctgtaattaggagtccactcatctcaaattagcatgcgagttttttaaaaagattttttatatgactccttctgtatttccaaaaacgaacaaacttaaaacctgactcaaatacatatatattttttcaaaagcaaacaaacttaaaaaccgactcatatacggatgacgtaccaaagtaccagcaaaaacatctttaatttttataacattagagataagtagagatagagaagagatatgcaatatgtacttacacgtagaatggcttcaacgttgcacaataatgagattgcgaattctatagctattagttgagagtggattaattttgatccctcgagaggatattctctcgttgtttacatgtcatttaaatagttatgaaaaactttaataaaatgtattaatatataatatatcactctacaaacatacaagttcaaattcaacttctatatatcgcaacgaaaacaaatttgactagaaaaaataaattgtttttttgcgagatgcataagttggaatttgaacttacatgtttgtggagtgatatatcacatgttaatatatcatctcttttttttcaaattttttatatttatctaaatgacatgcaaacaataacctctcgaggaataaaaataattttccattgtaattcacgtagtgctgcttactccccgtaggatgaaagtgtgaaatggtgccacatgcaactcttccaatgactcgcttaccgtccaaaagtgaacgaaacgaacattgccaccacgtacgctattaaggctccaagtatgtgggtactgaaaagtcttctcactaaatctaccatatacagccaaaacactgtcaatactccctgcaaaagcatgcaaaaaatatccaattagaattgttctaaacagatggaaaggattgttgaattctactcctggcagtaggggctgtagaacggtaattagattcctggctaaatcaagctagatgaactagaacaatgagaacattccaaactgatcgtagatagggtatatcgggtgaaaagtattaaataaataaaaattcagggaaatgatcagatataacttttttgtaaattcataaaaaaattattagaaatagatatataggcatgaaatatattcttacaaaatcttaagttcggattcaattttctttaggggtaaaattttttttagggaaatatatatagaaacatgactattcatctaaaatttgtctttatcgttccactcaaagtaagttaagtttgaatttgagatttggtatcaatgtatttcatgcttatatctatctctaataattttttcatgaaatttagagaacttttagctaggtataattttcacaagttttcattggatatttcctctttggttggacgtaaattttgataaaattcacaaatatatcatccacgggtatgtggatggtgaaaatgacactcgcatatttgctatggtaataggcaaattttattggccttagtatttttagaaagagaatgcaaaaaagatttatgtcctatttacatgtggcattttttccaaatcttacccaaatcgaactgatttagaggctgaacaatgcgtaataagatattttttaatatttaaaattgttaacaaccaaatttggtaatatcggcattgggaaagaagattagattgaagtgaagtcggaggcggagatcgagttcggaaatagagcaggagtccagatcggttacgataagatcggctgagcctgagtcggactaggtaagccgatgtagccgatcctagcaatacaacttgatgtgtgatgtcgggttggattgaggtgcttcaaggcgattgccgcacatggatagagtcctgaggaggcaattgtatctattaattaggatgttttatgtaatttccttagagatatgattgggcaaaaatctgccgcaaagacttataatatcttagagtttgttagagatagtagtcgtgtccgttatggacatatcttgtaattctcgaggtataaatagacccgagccctatgtaacttttaacacacgttcaatacaatctcggcgcatcgccacccttttactttagttttttttcgacgagttctttttcgggttgagctgcatcggtttcgatcttcaacaagaggtaaaacttgttatgacgacttgtgttttcgggattagtgcttccatctttatgatactctgatctcgtttatataattcgccgagctgtcatatatcttacataatctccggcaataccgctatctaatctacaatcggctaacatctgtcggtagaaggcagccgaccaggttaaatagcgacgttgacctaaattatataagatatttaccactttatgaaacttccagtggtttgattgtctagatattgttcttcttttcatacttaatgctgcatcagttaagtttgatctattaagtcgtacttagaatatcaacctctagcctgccttcaggttgccgattagggtagcatcggagtttcagccgatcttatctgatttaactatatttgctttatatgctttattaacatgttaaatctgccatttatgccaagatattgctgtatttgagtatattaggcttttgcttgatactctatacctgttttaatatcctgatataaagtagtatcggagtattagccgatacatgctagatctatctgatcggctatgctgtagacatatatagtcctgttattaatatatatatttcggtctaagtgatttatactgtctcggcatggcgaccgatctatcccaatcacttgatttaagtatatatcgatataaggagtatatatcgttaacatctatagctgatcgagtagatttagttctttcttacttattcaagattgccgatcgatacacatatgacatcggctcaaagataaagataaatgatgtgtcatcggcacttagccgatcggctatcatttatagatttaaccgcgatttctttgcttctacttcttgttggttacaggatcaaatcaactggcatgctagcacacccgaaggcgagctttggacctgcactggagttaagcagatctcccaggcatcgtgttttctgtcaacaaaaatataattttttttctccaaatacatgtatatatgtaccacaacacacgcacgctccaataggtgtatccttaacagacggctcaatacaaaacgctagtctttggtagaaagaatcagtgtttaatcatttgcatcttttgatctaacagtgtaccgtattactagctgatgtctaatcgtacaaaatgctagctagtcattgttactctctctatcccaaaaataatcaacctagtagaaagaatcagtgttgaatctttttcatcctttgacctaacaatgggtaccgtattactggctgatgtctaatcgcataaaacactagtctttgttagaaagaatcagtgttgaatcctttgacctaacaatgggtaccgtattactagctgatgtccaatcgtacaaaacgctagtttttgttagaaagaatcagtgttgaatcctttgacctaacaatgggtaccgtattactagctgatgtccaatcgtacaaaacgctagtttttgttagaaagaatcagtactgaatcctttgttctttgacctaacaataggcaccgtattactagctgatgtctaatcgtgcattgctatattttcgaatgaatagagcataaaaattaggattaaatttgggatccacggcgggctcgatcgatcgatcgatcagtacacttacccggacgacgcacttgatggccataacgccggccctgttccactcgtgcatcatctcggcgtccgtcgtcgtcggctcgcggcggggctgcttgcctgtcctcatctcctccgccgacggccgtcctctccgatcgccgccgccggtctcgacgtccagcagcggcgccacgtcattgtcgtccaaggtgggggcctcgccgccggcgcagccaaagcaactcgccgccggagagactcgccggagatacggtggtgtggtcatagcgcttggtggcatcgatcaccgattattgatccacccggccaacgcttgaaaagagatcgggtaacaccttgattccaggacacgtatagtccttatgtcacataagtacatgcatatacggtgggccctctgtcttttatcaattcttttttggttgctacggcctttataccagtttaatgacgtgatccggcacgttctgcatatgtcatctacgagtacgatttgtgcgggtatatatataggatcttctctacaattctattcccgtcctaaaataaattaatttaggaaatattttatctaaattcgttgttttagatactccatccatttcaggttataagacattttgactttggttaaaattaaaccgctttaagtttgactaagcttatagaaaataagtagtaatattttcaacccaatataattttattatgaaaatatattcaattatatttaattattcggcaggtagcaggagcggcggcgtcttcgtcctcggcctcgagcaagcaacgaggcacggcggcggcggtgacctcagtatatcgttgattagagatgttagtttctttgttgggactgagaactaagtaagacatgaatgatttacatatttcctattttattcagttctaaatgaatgattttattgatttaggcatccatctgggcatgatgcgggcattgatttggtcatcaatatgtgatttgaacagagccgactcgaattgagctttctgttttgtgagatagatcgattgagctttctgttttgtgaggcagatcgaggcttaggagacactgacaatgtgatcctgctaagattgggtgggcttttggatttgtgcgatttttttctttctttctttttttccccttttctttgggttctctaagtagggattatccgattggatttcgtatcagtttcaattttaatctttgtccatcgtacgcgtcatgagagatcgatggcgtcacttgtgagggcaggaaggcgcaccgccgacgaactaaaacatattatgtgacgatagaaaaatgttgaatattttaattagttaagataatatgtaagcactttgtatcgtgcgctagttgataaacaatatagtgcgatgctatttcataatatataaaaagggactatatatatttgtgccgtcatatttttcatgaaatatagtcagaatgtattatattgtaagtctctaaattacatgtggaattttagtatatttacattgtaatatgaaacggaaacggagagagtattatgtttttatagacactgctaaataacgattacgggcttattcagattgatccatttcaaatcataccattttttggtaaagttttcaaatatgtgcatctatttagtttcttaccaaactctgataaataaataaaaaatcctgccaaaacttggcagtattaccaaattagcaaaatttgatatggtttattttagctataatctgaacagaccatatatctcaatgtacctatttttttaatataataatgtccatccatatttttactattattaattaaggtggtagtataaactagcaaaagtgcccgtgcgttgcaccgggtgattacggagtgtgtagattgaccaaaagtgttttttggtttagcaaaagtgcccgtgcgttgcaacggaaagaaaaaacgagaacactatattaaaacatattaaattttaatttaatgaaatataaattttctacaatattaattacacactttgaaattttagcaaaagtgctcgtgcattgcaatggaaagaaaaaaagagaaaattaaattaaaacatattaaattctaattaaatgatatacacattttctggaatattagggtatttttatgttggtaggtatataattaaattaattttcaagtaaagtaagtgtgagaaataaaatattatggttggatttagtttttattaaattttctatattaattacactctttaaaattttcttggaatttatatagcttaattggtaattttcataatacaaatatcatttcagcatttatctaaataaaaatcaaaataaaaatcaattttctctatgggcctttttcaacccattttcttatttaacccgcaagcgtaaaagtctagttaatactcccatactcctcctctcacttgctggaccaccggcccgcgtgtggcccaagtggtacggtccaaaccctcgatcgatctgagccgaggacggttcagatcagttccaaattgatgaaaaccctatccctaaccctccccctcctcctccccatccccctccccccagccggccaccacccccgcgcccaacgccacctctccccctccccctctccccactggcgccacttcccctcccctcccctcccatccggcggcgccgctccccctcccccagccggccgcctccctcgcccccgacgccacctctccctccaccggcgccgcttcccctcccctcccctccggcagcgccgctccctctccccatctcccgcctctccccctcccccaagccggccgcctcccccgccaccggtgccgtctctcccaccaccggcgccactttccttcccttctccctcccttctcgccggcatggtgcggcgacggcgggtgtggcagcgtcaacggcgacgacggcggcgtccgcgttccctctcccgctctccttcctgtctcgccggcacggcgcagtgacggcggggtgcggcggagacggcggtgacagccgtccctccccctaacggcctcgacggcgacggcgccctctcaacggtggcgttgatgtggtagtataaatagatctgaacttctcgaccaaatgacatgaggctcctgttgaagaaggtcgcggcggtgccaccgttcaagggtggcatttaatttctacacgcgagatgaaattctagagaaaaccgtttccaacggtagcataatataatataatgacaaattttctcgctggtgatagtatggaacgttcatgataatgtaagtggcgaggatgagcatcccaggttgactccctgacaatgagcaaacgatctcatcttatggtatttgaggagctctattagtgatcgctttcgtcatgctcttagtatcgagggtacaatataattaagtttattgtaacctataatatttaagtgttctccttctcctcggccgtatttatttcttgagtttaattgtaactatatacaagttttgatttatagattgttcagaaacgcagaattaataatgcctgctggccaaataaaatttagggtccctttcaatagtaggaaggaaaatacgaggaatagaaaaaatatagaattctaacataaatacaaatataaagtagataattattaaaaacacaaaaatggctggtcatttgattagactgcaggaaaaacacaggaatctgataagagagatagactcaaaggaatttttcaagaggttaaaccttttactaagttttcttcaaaatctacgtgcaacgagctatttcatagaaattttatagaatttggaaaactccaattctttgaatcaaagatctacataggaaaattgcctatagaatttctacattatgaaattcctccataattttttttattcagaggggcctagcaagttcgcatatagcatcgatgtatcgaagtagatgaacatgtcgatcgcttcgagaaaagaaaatatggacccataaagaaaagacaaaaatgtaacttctacatcttatattaattactctatagacatgaaagtgaggttggtgcatagcgtgtacaattgcgtaaataactcctacttataattgacctcaaaatttaccacttaaaaatctcttggacgttcaagtgggctgcatccgggcaaagggagccgaaggcatagccacgcgaagatgctaaaaaggtcagccatgggcacggctacaacaaacaaaacaaacttagtaaaccacgagtctccgtcgccaacgtagtcggtcacgtatgttctcatgcaatcgaacaaatacagccacagcaagagcatcagaccctgcatcaattcaaccagcaaaataaaaaaaatcagttagcaagtgtctcacttataaaaaactgagtaaatttcaattttcgtcacattttattgccattgtttcggtttaaatcctcttttaacaaatattttcactttgaacagagtggatttacctttgtgacactttacaacagtacaccacccttgactattttataaatttccatcaacttatcatatgtcaaaacgatagttttagtataacagtgggacttaattaacgagtaaaagctagtgtactcgaaatcgtttatatgcttgagaagggagttaggatggttcaaggcgaaataaaggtaaaattacttgattaagtaaaaacattgcttaaaatataatacaaagtgaaacactggtaataaaaaactatgatcgaaagtgaattttgctttaggaagtgtctgactgtccacatataaggaatttgctgaacaaattaaatgccctaatttgtataatagaattagtccagagttaactacttgtagcatcgtttgtacatgttacatttacttacatgtacgtgtgttttcaagggtggaggcaagcctagggcaagccgacctaggtttgccttcataatcaattaattatatgtaaatatttttaaaccatcatacaatttctttttagaaagccaatatcctattaactgagttttatttaagccctaggattagaaaatttggctccgctatcgcgtgtattttttcttggaaacgcatagaaaatcaaaccgagctaggcagaatttcgttacgaagattcagaaagttaagaggcatagatcgatcaagttattaagctttgatccgtgagaaagtaattaatcaagcgcgtcatgtactatatggcgtcagacgaatttaacgaactctgcgtgcatgcagctagcatcgatctgtctgatattagtatatatacacacttactacgagttacgaacgcgtacgtacccggaagatgaagagcaatgtcctagcggaaaacctcgtcttcaatcgcgcatggtagtcgtccaaaggtgacggtggcggcggagccgacgacgacgctgcagtggcggcgtgcccgggaagctcgatatctcgacgccgatgacgccgccggcgcgaccgcacgacttgcaacacggcggcggcatgggtacgtcagtacgtgtgatatgatgcgacgacgtacggacggcgcgcggccgggccggcgatgagcactaacgggcggaacgcgtacgtacgtacgtacgtaggttggctgatcgatcgatcgatccgtgggttttcagtggtcacggattgcacctacgcatatgtgcatggtggcctgtacgttgaagggggttgcagtcagcttcggtctccaactatataatacctcgatctcctactataaggtctcaaagtttgtacgtacctggggaaaaaagacttgcacagtaaaagcttgtaccttggggttcgtggagagagagagaaagagaggagagaaataatgggagaggatgacacgtggagccattggtattttactttttttccaagggaccttcacgtttgtgggtcttgtcttctttttaaaaattttcaactgctggaaaaaatacccgtacgttgcaacggataaagtttattttaatcttattattgttatatggtttagttaagatgaaattcactgtgggagttcgcttggatatatatttttagaaaatcatgagttgcagttaggggactatcagactctaagttagcatgcaagttttttttaaacggatttattatatgattcattttgtattaccaaaagtgaatgatcttaaaagccgactcaaatatggatatgtatttccaaaagcaaacgaacttaaaaaccaacttatacacggatgacgtaccaaaatatcggtaaaaacatctttaatttttaaaataatagatgttagaatactatgtattccgtaggcatcgtgtcgtataaaagaccagatcaaaatgatacgtagaacaagactctcatctaaaccgtatgagaaaataaattatttcaattctaacattaaacgagcctatacatccgatcttaattgattttacaattaagagatgtgaatcaaactcggtctatcggtagttaatagaggtaaaatggatattttccttttttaatataagtctattttgcatcccttacctattgcctttgttcgaatcgcatccttcaaccctaaattcgggtatatcccatctccaactttgaaaacatgtgcgaatcgatttttccagtggtttgggaagctgcatgcctgcatctgctggcgtggcagcagtcagaacaaatcgtgattagactcgctgacgtgtaaacatgaggccacatgaaagtgataaaaaagaagttaaataaaaaactgtcagactcctcggcggagccatggaggccttgacgcgtacgttcaatgggggcgagagcgacgctgccgcctgccggtgcaacgcgagacaccggcgacggcccacgagggcacaggaggcaggtgaggcctaccgacggtggcccatgcacgaagaaatcttcagattttggatgcttaggccttaagagacgctcacactgtcgagagagtggagacaatgcaagagaaatagaaggggtgttgtctgtttgatggtcgaaccgtacgtgcaaatgtgcagcaggctgcttagtatttttctttcttttagaaacatagtacaaatgcatgctgcttaatgttgtacatatagtccatatatttacacttgtagagaattactccctctgtaactttaatgtacgacgccgttgactctttgaccaacgtttgacaattcgttttattcaaaaaaaaatttatgcaaatatgaaaatatttatgtcatgcttaaagaacatttgatgatgaatcaagtcacaataaaataaataataattacataaattttttgaataagacgaatggtcaaacgttggacaaaatttaacggcgtcatatattaaaatatggaggtaataaattattaattataacgcatgcaacctaatgtacgagttatctgtatatagttaacctgtaccgtgaagagattatatataccaccgcattcaaagcattgttcatgcatggacttagccacttaggctttggattttgtttgatgtttatctttatttagttctcaaagtatgtccatttcaaaccagcggcggagccggcgcctggtggccacttgtccgggctccgccggcttgcatgcagccatacctcagtaaattaatcataattaccttactattgctaattatcttacttagtcgtcattggcaaaatcagtagtgtattgtacatgcttaattaacatgcttagagcaaactaacaaagcaaatgctcagcccaaaataatttatagatttgtatagaattgggtatactttataatttattgttaggcttgctaaaactcataaaaatttctaagattcgcaactatttcaaacaaaaccactaaacacatgtttaaggttgttatttttacgattttaaaagtaggggttgaaaaataaccaatttgtagttcagatatgtaaaatgaactttcagaaaggttgtaggggctaaaaatgaacaataccccttctatttaatgaaaaacaatgctactcaatcgttcaaaaatattatgaaacatgctcctaggatcgtatagatacgcattttttttcgtttaccccataaaacttcttcaaaatcgatgtaatggaatcctagtacgtattatgtcccatacaacgaggacatccaaacacaaagctctgtattacaggtattaaaaccaatcacggagcataattacatgaagtcaaaacaacacagctacacacccccatgatcatacttaatcaaactttctgttcatcctcttgactggtcatgcggttcttcaccaagcatcaccctgcacgcaaggtagttatccattttactttctagggtgcatcttttgtttttgtgactgcagaacattgcatctagcagccggctgtctcctgataccaggcttggggcagctctacatcgtacttagtgcgtatatcaatggtaacctcgccttaattagttgcatgtaagtggaaataatatacttactaagttactagcagacatttgaggggacgaatgaacttgaacagtgtgcagtgtaccaggagagagctgcataatctgatatatagcctgactggtaggagttcattggtccctgcagtcaaagtgttcatgaaatggttatctactgcatgggatacagccaaatagccaataattgtttttctttctcaattgtaacttgtccccagtagggctggagaagacaatcaggacattattacctactccagttgatttatgatatgatccagaacctttgagctgtgtgattcctaattgattaggttgatcttatagtaatatgtatgtcgttaagttgcgcgcatgcatgtacgtgtaattactactctgaatacttgcaattaacttatgtttcttaactatatagtctacaggatccacaccaaattgcagtatctttttcttgcgcttcgaagtgctcacaaaatgatcaggttatatgaatatactgtatattcgtcagactgaatcatcagatggaatctgcttatgaatcaatttatttgttcctcaaacccataatgcaataatgtgtagtatatatgttattactgatgtaccagtcattaatgtttctctagctctcttttgtttttctgaccaaattgatcactgagggtgagtttgaggaataggggattgaaaagattgggaagatacgcaaaacgagatgagtcattagcatgtgattaattgagtattaactattttaaattgtaaaaatggattaatatgattttttaaagcaatttttctatagaaatttttttaaaaaaacacaccgtttaatagtttgggaaacgtgggcgcggaaaacgatgtgctatctcactcattgtccatggaactaacacaccctgagtggtcactgctagccttgtgtcttggaagagacatgaatgaattgcaaagtcttgaaaaaaatggtgaattgtctaatggctgcctaagggcagtcccaacccatagtgtccataagtagtgtctatggtgccgtgtcaataagacatcacaatagaaactatactccacaacccatggtttcttaaaatgggccattaataaatacatcatctctcttctctaccaatcatatttattctatatctattatgaagacactattctctcgcaatgcaaaacttgatagtgtctagtgcataggttctcgtgttgaagctgtgtcttgcatgagacccggtttcttcctctcttcactctctctctcttaattaatatagtgacacataagttaaaagtcctacatggcaatgtacttaatgctatatacatcatcctaggtggagggttgggactaccctaatagccgactacaataattaatgagtccttttgttttcttgtgccattttcttgcactactagtctgctgatttcttaagtgcattgtgaagcttttcatggctaatcaacttatgattagcatctgacatttgctatagaaacctcagccagcttaaacctcaactaacctcagtcatgacaatacatgatgatatgcccctatacatgagtattagtatatgaattgcagagaaggcccgttcgaaaagatgaagataaagattaaatatggacatacgaatgagaaaattattagagtatgattaattaattattaattatgtcaaattttaaaaattaatttagctgatattttttaggaactttttatatatatatttttttttacgttagctatttaaaaaacatgctaataaaatctgagatagaatcctcatcacgaaaataacgggacgacaggttttaatttgtcttgggctctgggcgctgcacgagcaatgcttctagaacaacctttggggaaaaacaaaatgcagttactggatcatcagaatattcacaacacagtaataacatcaatctgattggtttagaatcctgctagtgggcccccaataagatttcagtgaacagtgctcagcactttaatgagccatagattgttaaactcttaatgcacgtggaggaaattaatggcaaccgggtttactcctacaattaatggaaaaattaacaatggttttgtctcaaacccccaaatcaattatgccactccgggatcgattcacggtatagtataatctgtcatatgcaggtacaggaaactgaaacacaaacactactaaattcagtctgccttcagtaactatacccacacagtttcgacggcatgaatcgatcctcttcgcacgcttgagtgctttctattgcagtgaatgcaactgcggatcacacgtgcgatcgatcggtcgtcggtttgcactgtctgctggaagccatgcgtgcatcgatagatcctaacgggtgcagtaataaaattctgcacgcacacgaatggacttggagatatccaatgctaagagcaggtacaatagcaggctataagccagctacaaacatattttaagaaaataaataaggagagagaagagcagcgggctacaaatttatagccagctgtagcacgaactccaagacgcagtgtgtatatgacaggtggggccaggtattaatagtgtagtatgtaactattgtatgaatgagctattagattggctatagattaattagagttagtagttggctatactattaaatttgctctaagtagctagtacagtacctactagcgtagttacatacgcgacaatctgtccgttatttctgttaagttactgcctatagctttaagataaggcttaacacttttgtgttgtacagtacatatatacacatactagtagaatctttaagtagctgtttgtcatgaacaaatcaaacgacgacgacgagaagaagaagaagaagaagaagaagagagagagagagagagcttgttcttctgtctatcacctaacaaggctgccacccattaataaaaggaaaatctcgaagcccagctgtgtcctcacatttcagggagagctaggcagctagcagctagtctactctaatacggaagcagactcaaaagtctgcatgcagaacgtagacgtagtctgttacgacttcgttacgagttgcagtatatctaacataattttccacagtctgtgtttggatctaaatttcagtcctttttcattacatcaatctgtcatatacacataatttttcagtcacaccatctttaatttcaaccaaaattcaaactttacgctgatctaaatacagccatagctgcttcagtttaatatacggcatattccatcccagagccagactactcttaaaagacaaattgttgtttcgatcgtgacttttttttatacgtaaaagaattattcacttttgtattaagaggaacaaaatttacaggaacggctaaacaaataggagagtaagaggcaggggagaaaaggaaaagaaaaaaagaggacttaaatatattctcacactatcaggccatttctaatccaatgagagcaggtacgatagcagactacaagacaactataaacatattttaaggagataaaatatgagagagaagagcagcgggctatagatttatagccagatacagcacgggctacaagacgcaatgtatgtatgataggtgtgaccagattaatagtgtagtatatatttctagataactattatatgaattagctattagattggcgcgctatggataatttggagctagtaattggctatactattaaccttgctctgactaggatgatatccatagcattaaataaggtgacacctagattgaaagatgatgtggtaagtgaataaatgaggaaagagaattaaaccgggtcttgcatgagacatgatttctaaacaacatccaagacatcatgtgagataagtagcattaaatttaagtatggaaatatagtgtttgtattgaaagagtagtgtctagtactactttttttatgatgtaaagtttacgaaaactatgtctaatgttttggattgtgactggcctcagtgtgatgacctagcgaccgactacgttacccagggattttcgcgacttccaaataaatgaacagacttcttttttcccaatgaatctgcgcaacagcaagagcggcgttcgttggtcaggcaccgaaacattatcacgatcgagtttaatttgtacatgtttcagtgcgaatcatctatatatatcagcatgcatatatacgcacacaaactattttttggacgtatatctacacaaactattactagcatatgcaggaagttatcgagctgggacaaatatctgagtcgatgcataattactgctcactgtacagtgatctgtaccgaccaagcatatgcatgtaggctgtagcatctacaggatacacaacggcacgattcacgcagctttgcatggtatgcacgattgtgcaaatttcactggctagttttgcaacacagaaaaatttaaaaggtaaacttgcagtagaatattatttgaccaattacaccaactacaggcatcataaatggaacctgactaaacaagacagccccagtggctaattaagttagctgactttacaagctttcggtttagtattattaagatcgatccacattagcggcagctaaaactatcataactatcagtgttcgaatgcatatgcatgagtgcgctgcatgtcgtctcatgttcttctgatctcactggaagctgatcaacagagagaatattattgcaattaatgtgtgaaaaaatcaacaataataacaagccaccacgctataggttagattccgtattagagttctttgcttataaatctgattggttcaccttagttcagatttgaactgattaatgacacactaaggtctggtgtagttcccaaaattttttctcaaaaaatcacatcgaatgtttggacacacattgtagtattaaatatagataaaaaaaactaattacacagtttgtatggaaatcgcgagacgaatcttttgagtcgaattagtccatgattagccataagtgccacagtaatccacatgtgctaatgacggcttaattaggctcaaaaaattcgtctcgtggttttcaagtgagttacgaaattagtttttttattgtgtccgaaaaaccccttccgatatctggtcaaatatccgatgtgacacctaaaaattttcttttccccaactagtcagggccaacagacaggagtacggcctagctagctagtgattatatatatatatatatatatatatatatatatatatatatatatatatatatatatatatatatatatatatatatataccatagctatgctaaataatgtcacgcgttttaccgcgaaatacatgaataaatatatattgaatattatagtatgatgaataagtataagttaaaaatatcgtgaaaatgatgtgatggagatgatggtgcatgcttgcatgatgagctctttagttgtaataattgctggtgcgtgataatatgatattttttgtgacttctaaggtgtaataattgttagtaactagatgataccccatgttttgttagggacatatgaatgaatgtatgttaactattgtaaaaaagatgaagagatattgtcatggttatagataccacgtacctaacagcaatcgattaagctctgcagggcccaccatataccaagtcttatacggaatcatacctcatatatataaggagttccagataagaaaggacgagtagagttctatatgaaaacgacaacgactactcggatcatatccatacttgtctccctagttctacttggacaagagaatatctatgggtataaatacaagacctcctatgaggagaggagacacacaacacacaagccaagacaagcctgacatcgacatcagagattagcctagacaaacccaatatggtgcctgtggaggccgacaagagggatctaacgccatctctaatctcgatgagttcatattcgaggaggaagattaccctgtcgtcgactacgtgttggtgtccgtgccgccatgtcgacggcagctagataggttgtcctaattgttgtacttatgtgattcagacgaataaagagcaacaccggcttcggccaacaggagtagggttgttaccttcctatgaaggggctcgaacctgtataaaaatccttgtctctatcttttttacctcaatctcacatataccttagtaccaacgatctccatatcatgcaaataccgtagtcgtgatctcaaacgtcgacagatatattttgaaatattgtgaaaactatatggaagatgatgatttgacatgcttgagttctaaaacgttataagttggatgatatgccatgcttatatgagctttaggtaataatttatagtaagtgatgatgtggcaggtatatgtgttaaggtttagagttagctgggttctaactatatagtatatataatgtacataccgaagttttgtatcaatactaatttaggggctacgcacaagatctaaaagtggatggatgcagaagacatgggtttatatagctttaggctctcgatgtgaggtaatatcctactcctattttgatggattgtattatgcctgatgtattgatattgtgtcgatttggtgtttcttattctctgttgccctcgaggggatccctgcatgtcttatatatgttagggggtagtgttacaagttaggaaacctagccgaacacgccttcggttaccttatctatccatagcattgttcggttgggattctctgtacgctattttaggatacaaggcaatatggcaaacagatgttattccatctcatatcatatggatccggcctaccttctatcttagtcgatatgcaggccatatgggtatctggtatccaactatctatactctgcaagccaagacacaacaatcatatgccaccgcaagtcgatatgtcgttgagtcagagatcaagcctcaagatccatcgagccggtgcacccactgatcaataaaaactcgttggaatccccaacaagactagcatataaaccttgactaggtccatatatatccttgtaaccatactcttttggtattaataaaaccgataacccgactgacaagatgtatacttattactctaagaagggttcgaacatatataaaaatctctctttaatttaactgatatcttccttgcagagatgcaacacttaaacatgaccccaaatatacgagtttcttattatcagatatttatcgaaaataagaaattatagatatgctatgagtaaaggtatttttttttgtgtgcatgtgtgtgaatatttagttttttttaactcataaaagtcttgcacataagaagaatagcatatttagttcgatggcctatcattattgtagccatgctatgttgagttaccttgcctgtgtggttgacctaattttaagttgattttgaatttgagaactaattaaaacaagtaaaaatctgcctaacattattcatgagaatcaaactttacaattttaaatttctcctgattatacttaaatccaattcaaagcagagtacacatttgacggtattcacgccgagagagatggatttgaatggagtatatatgattagagtcacagaaccaaacaatgtaaaagaggaagttacaccagtaaaaataattattgaagtaaatgtttcacgtacgccgtgcatgtacgagtacgttgtaatcataattagttaatatactcataataaacgacaattattgtacaggcgaagcagcggagatactccagacagcttggtatgtagaggacaagtcgagtacttgaaatactttgaataggtgcatatgtatacgtacacttttattaatttcggcaatgaactaggagtactccatacatatatagatatccaactatggcaacgtactaattataaatcttatcacaagtacataatcgtgattggaatactctcactaggcgccaattcgggtaatgaactacccactctactctcaacttactaattgtaaatcttatcgcaagtacaatatcacatatccggcatgttacgatcgaacttttccccaacaatacaataattaagacagaaattattaagcaagtactagtatatgaatattattgtgcaaaaggtactagtacttgcttaattcacttgacaaatatttgtgcaaatagacaaatatactataggtatgtttaaaatgcttttgatatataatagatctagttgtattattttcatttcacttaactaagtaactgaataaacattgttgatcaaactttcagaaggaaaaatcaatgcaccatatattaaaaattgaggtagaggtgtgttgtttttcctgtaatgaaatggaataataaaaataatattttccgagcctctaaatggtgcaaatcatataaaaactttataatatacaaatttcttatataaacggttttaaattaattttcaactttacactgtttaattcattcgtttgactataaaataattatcataaatcattctatcattcatagcacacaagaatagatagccactagctaacctaacactttgcctcctgtctttccttagctcaactgaaacccttaacaaataacaactgtctcataccgagcacagcaattacagatcaactcaacacagcatcaaacatgattactccctccgtcctaaaaagatataacgaatctcgttatattaggaggggtcacatatccttctagattattttttttaaggaatgagttcttcgtagcagtagagtagccagtaaaaatatacttttttcccctctttcggatcggatggccatcgcgcacgcgcacgcgtgggtctgaataaaatcccgcgaaatgtcagcgacgcacgcgtgctcccagctagctagcgcgaacgaactcactgtcagatggtggtcggttcgtcgccggcttgatcgatcgatctccatctgctgctgaagcctgcagaagcattcgatgcgagaatccgagaggagttgccgagatggcaagacgcatggaaaagagtagataacctaatcggatcagttgctcgatcttgattgatgctgggattaaccggtaggattacgcgaagaggtaagggggaatcggaggaggagcagggttagttggccagccagattggtcgccgtcatttaatgagctccacatgccgggatcaattgaggaacacgaacgccattaattgcccctaatcctcccacatcagcgatgggattttgccaagttgacctccagattattactactccatcccacacgcttcatcgccgtaaaagtcatcatttacaactcaaaactccagactttgacctctccctgtagggtgcaggccagtgctaacagagtaacagaggttcatcatcagaattactgatcaccaagccccaagtaagtactaacagagtaacagaggttcatcatcagaaattcagaatcactgatgatcgtcatatcaagagtagatatactcagatagctagctaatgcatcacgcatgcacgaggtttttacttaatttcttttcctggatttttttgatcgatctagtggtcgctatataggaaccacacgaattgcacacgattgagaagcctgtaaatatggcaaattaaggaggggcatgtggtgcttgattctgcgacatcaatgcgaattaaacccagcacggaatcggatgatggagaccgacgtgtgcatgggctatatatctagctgaattaatccgcgtgaatcatatcgatcagcttgatcaaaattaaaccgatcgatgtgtccactgtagtaaccgatcgacacgtagacgtgcatgcacgtagaaacgagatagacatccttgactcgctacttgatcaccaacttgctactatactttttcctcgctgaaactgtggcagaggatcgatgcaagcagcatgctaatcaacggcattaatgaccaagcaaccatggatgtgtggagagaaattactactgctaatatcaagtttattaattatagtcgtcacaacacaagtgcattaatcacagactcgtgtacatgtaataaaagaaaaactaaggcaagctggggggacagcagcgagtttcttaatcatgtcagggacaagcttagctaagtacaggcagggcaacagcagcagagaatataattacactccagggcgcttgattagcgagcagcaatgacaggtattaacggaatccgaagcatcttgtccctcctccttgctgtgtgtgggacgtcatcaggatcctgcttaagatatgccaataacattccctgctcgatctgtactccacggtgcacgaacgtcgctggatgtgagggtcgatggccgtcggattaagaatcgacggctgagattacgatcggaaggtgccaactgtagggagttcagatcgatcacggctccttgattatactcggttaaatcccaagtcagatgatcaattcagcacgacagaactgagaattcgcactaaacatacaaatcgggtaaaagaaaacatttcctagttacttagtgttggagtgtaaacaaattgcttgaagacagtgatcgatgcatgtgactttcgataatagagctaaagatctctagtctaaaccttttctcaacactttaagcttttgtgttaaattagttagcgtaggtaacttaatgaggctgctccgctgctattgacagtatcgcaaccaatgcaactacttatatcctagaacaagaaaactggcttaggtgctgtaaatgacagccgaacaacgttaataactaaaatacccataaacattctaaagaaacatgtaccgctatcaacttggagttacacacacgtagtagcattttatagaaaattaggtcgtgtgttggcacggtgcaataaatcaggtgtagctaagcatgcacacatctaatagcttagggtatgtagaaaattccagccaggctaacctgacccaataaattacgcgatcgatcacctcgcaccctgtttagtgtcactgacatgcatgattgattgacggccagaatacagtaagttgagcggaggcacagcaaaagagaaaaaaaaaacagtcaccgatcccatctcatctccccaccggtctagtacctctcatctcaccccgcaaccccagcgtgcgtgcgtgcgtgcgggcttgcacaatatgccggtcgtattgcggccggcccggcaaagcggcgagagcgagccgcagccgcagccagctgcttgcatggcatgggccacgtgacatggagacgagtcgggaatcttgagacgtgggactcccccgctcgctccgccgcgctccacgctcccgttagctgtagcgcacgccgtcatcctcccaccccgacgcgcgcccgcgtgcgtgtgagcggcacggcgaatggctccgggaacacggcgtcggcagccgcgatcagcgagcccacctccagcatttaatgcgcccgcgtgcactcgcgcctccacgcttgagttgtttgtttagcccgagctccccatgtgcccgactgccgcggccgcgcgcgtgtatatatacaaacccacccgtgccgcccactacaccacactgcagactgcaccaccacacgccgcgccgccgaggagaagggtgtgcgtgtgactgatcgacgacggaggagcgcgtgtacgttgccgaggcgacgaagggtgcagtgatcgtatttgttggtagtgtactagtgtgcatgcgcatggcgctggtgcgggagcgcgcgatggtgtacggtggagggtgcgacgccgaggcgttcggcggcgggttcgagtcgtcccagatggggtacggccacgacgcgctgctcgacatcgacgcggcggcgctgttcggggggtacgaggcggccgccagcgccgggtgcgccctcgtgcaggacggcgccgcggggtgggcgggcgcgggcgcgtcgtcctcggtgctggcgttcgaccgcgccgctcaggcggaggaggccgagtgcgacgcgtggatcgaagccatggaccagagctacggcgccggcggcgaggcggcgccgtaccggtcgacgacggccgtcgccttcgacgcggccaccggctgcttcagcctgacggagagagccaccggcggcggcggcggcgcgggtgggcggcagttcgggctgctgttcccgagcacgtcgggcggcggcgtctcccccgaacgcgccgcgccggcgccggcgccccgcggctcgcagaagcgggcccacgcggagtcgtcgcaggccatgagccctagcaagaagcagtgcggcgccggcaggaaggcgggcaaggccaagtcggcgccgaccaccccaaccaaggacccgcaaagcctcgcggccaaggtaattaaacttttactgaattccgcgccaaaatcctactgctactccgaccaatccatgtaccgaactgaactcgaattgttcttgccggcggcagaatcggcgcgagaggatcagcgagcggctgcggatcctgcaggagctcgtgcccaacggcaccaaggtcgacctcgtcaccatgctcgagaaggccatcagctacgtcaagttcctccagcttcaagtcaaggtatgcacacatctctcgcaatgtgcacgcgattacgcggttagaattagaatttggaggttctaattaactgtgtttctgacgatgaactgcaggttcttgcgacggacgagttctggccggcgcagggagggaaggcgccggagatatcccaggtgaaggaggcgctcgacgccatcttgtcgtcgtcgtcgccgctgatgggacaactcatgaactgaactactactgtagaagaagaaactacgatagaaattattaatcaataacgaaccacctcgttcgaagataaataatcaagggaggcatatgcatacgtacgcaggcacaaaacttttgttttttttctctcgccactgatcattagcgctatcaatgtacctttttttaggggagttaattagcgtgacacacgtacagggaggtttaacattttgctaaaccttgtggtcatgttcttgtgtactgcgactaaatacaacccccttttctctcttcatgatatggatcgttccatcatgtaagttttagtcagatcaaaacatgtaacagtggttagtcaggtgtcaagttgcactgctggagaacggatcggaagatgttcgttcctttttgcctgccaaagaaagaacttctgatccatcttaatttgtagggactaatctcaatttctgcaaagtgcttatgaaatccagaattatacagacaaacaattccaggacaaatctgcagcactcacctagtacagatgtcttccaagatgtatgaatcaatcgtacgtccagtttcccgatcaaggagaaatgccggcacttggaagtccaaccaaatgtcttcaattggtcgtgctactatggttaacgctgttctcagcgctatcccgatctatctgctggttgtgattgatgcacccaagtgggtggtcaagggcatcgacaagatccgtcgcgggttcctttgggcaggtaaagcgcaagctaatggagggtgttgcagggttgcttggtccaaagtttgcgcccctaaaaactacggcggtttgggtgtaccgaatctggagcttatgggtatagctcttcgttccaggtggacatggttgcaacggacctcctcaagcaaaccttggcaggggctagctattccggggtcgcaaaaagaaaggaacttcgttgcatcctctaccgtctgtcaattaagagacggacaaactattctcttctgggaagatagctggttgcaagagggttgcattcggtccattgctccgaacatctatgataaaattccaccacgcgtgcgccggcgtcggacggtggctgaggcactaacaggtcgccaatggatcaaagacatccgaggagcacttgggatccaacctattctagaatatctacagctttggtcgcttgtccaaatggtggatcttgatcctactactcctggttcaatcatctggaaatgagagagttcgggccaatacagctcaaaatccgcctatagtcaccttcctttccaccccaatttggaagtcactcgctccgcctcgatgccgcttcttcttgtggttggttacaatgaacagatgctggaccgctgaccgtctgcgcagtcgagggttgccacacccggatcgttgtgttctttgcgatcaacaggacgaaagcattgatcacatcttagtagcatgccctgaatcgagacaattatggtggtgaacgcttcaggcgataaggagtccgaactgcttacctgtcaacgagccatccttccacaattggctctgtgatagccgaatgaaaattggggcgcggtatcgtcgaggcttcaacactgtcgtgacattggtggcttggacaatttggaaggaacggaacaaccgaatcttcaatcaacaacaaaggtcttggaccgaagtggcgaaagcaatggcggaggaggccatgctttggaagtcagctaatcacggggtccccgctgtttggcctttacgaggtcgtggtagtcaaatttaacgcgagatatttttatagttttccatagcgttctgtatcggtcccctgcttgttttccttttatccttgtaaataacttttatttctcttaatggaaaaaatgcgctccttgcgtattaaaaaaaggagaaatgccggaagaaatgagggtttcacgatgattgaatgaaccgtccagtttccagatcaaggagaaacgccggaagaattgaaggtttcacgatgatctcgcaaataacgtcggggaccaaggaggaacacgtacgcgtggttcatcggagttgtgacttgtgaggtagtaggaggggcaccgtaacggcggagcgggttcggaagatgaatctccaacctgctgggggtttcggggaataaatctccgacccccgatgtgacagttgggctatgcagttattggcccgtttagtcagaactgcgccaatcaccggccctcctagccgactatcttcatcctctccatcgaaaaccaaatcaaaacaagtaacaacggagaacagatcggaagatgttcgttctttttttttttccttaccaaagaaagaacttccgatccatcttaatttcttgggactaatctcaatttctgcgaagtgcttatgaaatcaagattcaagaattacacagctctgacgcaaaattcttgggctaatctctcaacatgatttgcacataggccgttctcctgacggggtaagcataaagccaaacaatgccaggacaaaaatattctgcactcagtcactcaccttatgcgtccaagatgtctgaatcatcagtttccagatcaaggagagacgccagaagaaatgtggttttcagttttcacaatcttgcaatggcgtcgccgcacagtgcgtggtttcgtggtagttgttcttcgggaataagcgagggcaccgtgtatggagtacggtggaggggtcggcggacaaatctccaacccccaaaatagtccacttgggctatgtaattattgggccgtaaagtcggcactgggccaatcaccggacctcctcggccgtctcgctccatcctctcgactctacgagactacgactctcgaccgaaagtcataaggagcgatcggtcgctaggagcgatcagtccctctccccagatgattttctttttttttagcaccgtatcacttttctattttagtaaatttatgcacctaaagtttgtacaccttaagtttacacatctaaaatttagagatccaaagtttataagtcaaaaatttatatatccgattcaaatttgaatttgaattcaaatatattttatatatactatttctatacatctaaagcttatacacctaaagtttagagacccacagtttataagtcaaaagtttatatatctaattcaaatttaaatttaaatttaaattcaaatattttttaatatagtatttctatacatataaagtttatacacccaaagtttataagtcaaaagtttatatacctgatttaaattttaatttgaattcaaatattttttatatagtatttctatacataaaattttctaactttttttttaattttttttaaaaaaattatggcgtagtagaaagagaagaaggggatgtggaagggggaggggagccgtcttaggggagggacgggtgatcgctcacagcaaccacccgtccattagcacctcccactctcgacggcaattaagccgaggaggtatcatttatacttatacttatatagttcatccccccgttaagctatttctctcttttctcattaagtcatatcacactaattatttctagccattagattatagatgtatggttgaaattgtttcttcttttttctctcaaagcaccatacaatcttaattatttataggcttaaaatttataagtatcaatttgttttggttttaataatcatattgtatcctatctgtatatattatgtaacttaatttcctatagcaaaacggcggggtattcatctaatttgatctggttttcaaagttaaggaaaaaaaactcgttgaaagcttatagttgaaggacgtaatagcctactaggtgaatacaacttccaagcccaaatgactctggcaagaactataatgctactaaggcttgtacgtctcatggaataagttcacctgacgtccctcaattgtacgccgagtctatttaaggtcctaactgcaataccagaaatgtataccctaaactatgtaaaaccgtctaaaaaaattcccaaggcaatatagatgcccggtttcactaacgtgacattctagtaatcaaaaataaaaataaaaaagtatgtgggggcgcacatcctagttaacatctctttttttcctcctctctcttttccttttttttgttttgtcttctcttatcttcttcacccgtcaacggcaaaaggatgagaggcggcggcggcagcaactggtgccagccagagagggggcgagatgaggctggtgggagagggggaaagaagaggccgctgctctcgcccaccgccttcatctccgcctctgctgctgtcgagggcgagggcggctagatctgctcgtcggcggcgcctgtccccttattcgccgccactcccgagggcgtggggacggcggtgacgacgacgctcgcgcggaggtcgacgacggctccattgccagcggcagtttcaccaacacattccgcatggcggttctggtatgccatctcgggttctcgaaggtgaagaaggcactcagcctggggtccgagcggcggccgtgcgaatccatcgccatcgtccacgacttcgccgaccgcatcgtccacatcgtcgtcgtccttgaaccccatcccccgcaatgccgcacgccacccatggcacgacgagctaggcttggtgctctcctcgccgccatctccctctcatccatggctgggtcgggtggttcggagcgcgaggctgagcagcacgccggggcctagggtgcaggggttggtcgccgccaccgttgacgtggccaagcagcgtggagtcgacggtggccgcctctccccatctgccatcggcggcaaaagagaagataagaaaaatgaagaagatgatgctgacacgtggacctcacatttttccttcttacttacaggtgggtctcacatatttattttttttattttttgctgactaggaagccatgtcagcgaaaccaaacatctatattgccttgggacatgttttgaacagttttacatagtttagaggtacatatttcttgaattgcggtcagactcggcatacaattgagggacgtcaggtgaacttgtttggtgactaaaattttggcccattcatccattcaaattctaggccatgactggtctcatttggaggctactccctgattgcattgtcacgctagaattcttttcttcgcatgacaacaagagtctgcgatttggactgatggagagttatcgggtcttgatcgtcaacttaacttacccacctaaatgctccaccgcaagacatttcttattccatcttatcttccaccctattatatgtatcacccccatgaatatcgtttgattagatcatgggggggcttaatccccctactcccctgtctcgctcaatccgttgcaggatgcgtattaaaatgctcgcttaaactgtaagccatataaaattaccaactaaccatgataattgagaggtcattagctccttaatattctaataactagacactgccgtcatgctattaatacatacactggctgactggcacgcggaccctccctccattgatgtcaatacattagacccacatgttagagatgtaggcatcgctcgcatcatcactatccttaggatgtgtttgagaggtagagtttggaactccatctccttgcacggaaaacatgatggtttattaatgtataattaattaagcattagctaaaataacttaaaaatgattaatatgatttttttaaaataacttttgtataaaaagttttataaaatttgtaccgtttaatagtttgataaatatgtacgtggaaaatgggagataagttaggaaagtgaataaaagaactcagtcttaggccctgtttctttcagcttaagattattctaatatagattatagaactagattactataagctggattataataagccgatatagaataagctgctagctgtttgtttctgattattatctgtttgttagctgttagccacccaataattaaaaaaagcaaaagcacctttagagtggcttaccagattatagtaatctgacttatagattataacaatctatcataataagctatctatttgtttcagcttactcctaataatttagattataatagctgaatcaaacatagccttaattagctcctctttgcaaaataaaaaggcgaaacgtgcatctccaccaccggatccgccctaccaaccagtacaaaatgccaaatcgttttgaccatttgacgcacaaggcaacaagctcctacgccgatgaggtggcccagcttgtcatgctcccacacgcacacgcaccgcacccacaccacaccgagaaataattttcatggcgtgtgtcctcgtttgtcaaaagggaatcaaatcaaacacacttccaaccctttaatacttccccgtttcatttcattatagctgtacaagccttaccctggtttcagtgccctttaattagttcacacgctcacgtctcaaacatggcaggaaaaagatactaattcctttttggtggttgtcttgcacaccgcccccttgacagtcacctaatcctgaatcagcacatgtgaaaagttagcgttgattacttactcctactgtttgggttcacatcacaagttgtagtggcaggattagattatagtacagctggattaatttgcgagagaatgagtcagtcaggattgatcagcaaatcaagcgatgatgataagaacaactgaacaaaagcagtggacaaaaatttggatgatcagcatccactgccgtccaatatcagaaaacaaccagaataacagagagaggggtcgctgtacccgtaggtgttcatgttccacacaatggtcaagcagcacaatttgcagtcctaaaaggacaagcatgaaatatttgcagcaacatttgaaaaaccagttcatcctgcagccatcaacgccccctccctctccatccccatacctgcagcaggcagcagcatatccattttattctcctctcacctgagctgtacttatatgctctgtagtctgtacacattggtgccagcacaacagtaagcactaagccactaacgagccaatcttcagattaaggctaagctagctagctagcctgcaacctctctccaacaacccaatagtgacgagaggtatatattcctgcagagaagcagtgcaaaatttcccaaggctttctctcatcagagaactggttttgatgaagagccggggagaagaaggcgaggctggatcgtcgttgtaccgttttcgacatcgccggctgatggatacaacacccgcgactgattcaggaggtacgtacgcgcagttttctttcttgctgaagatattgcagtgtgtgtatgttcgtgttcttgagttggaagaaggtgactgaactggcgtcagggtacgcgttcttggtttgttgcaccagggcactcgagccacaatgggatgccgataatggtgtcgattctggtggtggtcatcatctgcaccctcttctactgcgtgtactgctggagatggaggaagcgcaacggtaagatcgatcgatcgatcgattattcagccatgatcaatccgcaaacgctgcaaatttgtgaattgttacatttggttttcttggttcctttgcagccgtcaggagggcgcagatagagagcctgaggccactgtccaactcggacctgcctctcatggacctctcctccatgtacgacgccaccaaccaattctccaaggagaacaagctcggcgaaggcggcttcggccctgtctacagggtatgaacaccagcaaatttttctagattttgtcctggaaatagcactactcctgatatatgccaatttgcatcgactgaagtttgggttcttggatgtgatgatcagggtgttctgggcggtggcgcggagatcgcggtgaagcggctgtcggcgaggtcgcggcagggcgcggcggagttcaggaacgaggtggagctgatcgccaagctgcagcacaggaacctggtcaggctgcttggctgctgcgtggagaaggaggagaagatgctcatctacgagtacctccctaacagaagcctcgatgccttcctcttcggttcgtctgcttcctctctctttgttactgtttttttgttttgttttgttttgtcattataaattcttgcaggattataggtattttttgtgattgtttgaatttgttagtggctggtgagaaactgatacacatgggatacgcacatgattgcgtcaaagctggactcgtggttctgcactctgcataatttattgttttttcgagtcgtttaagtctaacgaagttaccaaatcgatgcaaagtaggtcaatgggaagcaaactaggtccatgtgcttcgtgcgtgtagttaaacccgattggaattataaactgttcagattaaccgatctgacctgtactgaagctctgtttcatttcatcttggaacactgaaagtctaaaactaaagtaaccatgaggtaaatctaattcggttttgtctcgtcagattccagaaagagggctcaattggactggaagactcggcagagcatcatccttgggatcgcccgtggtttgctctacctccacgaggattcatgtctcaaggtcatccacagagacctcaaggcgagcaatgtgctcctcgacaacaagatgaaccctaagatctccgacttcggcatggccaagatcttcgaggaggagagcaacgaggtcaacaccggacacgtcgtaggcacatagtacgtcaacgtatttgcactatgtgcatcgatcacctgatttctcatggctcatcaagcacaaatcttacctcaacttgtattgaaatgaaccgatggattttgcagtgggtacatggcgccggagtacgcgatggagggcgtcttctcggtgaagtctgacgtgttcagcctcggcgttcttgtgctcgagatcctcagcggccaacgcaatggcgcaatgtaccttcagaataaccagcaaaccctgatccaagatgtaaaaaaaaaattcagaaactttttgcatcaaactctttctggtaaaaaaaaaagcagagtcttttttttttaacttgtttgtgttcatatgaacgtgtgcaggcatggaagctgtggaacgaggacaaggcggcggagttcatggacgcgtcgctcgccggcgactactcgaaggaggaggcgtggcggtgcttccacgtcgggctgctgtgcgtgcaggagagccccgagctccggccgaccatgtccaacgtggtgctcatgctcatcagcgaccagatgcagctgccggagcccgcgcagccgccgctgttcgcggcgcgggagatgaagaaggtctcggcgtcggagttctcgctggcgatgaagacggagaccaccaagacgcagtccgtcaacgacgtgtccatctccatgatcgagccacgataaaaaagaagaaagaaaaaaaaacgtcgttttttttcttctttttttatttctctctctctctctctcaaactgtgtttattacgagagttttgataagctagtggtgatggagattgagaaaaataagaaacaaataacagcgtggagataaaaaaatcgacagggagcttgacagattgtttcattctttggtcgtcatacccacaagtacttgtaaatatcatcagttcactgaaagaaaaagtacttgtgaacactgttactagtgacatctctgttcttccttttcttgttttaatttttaacccatcagaaagtgaacttttgggtgtggaaaatcttgcaaacctgacatattccgcaactagaagatgctcttcaaattaacaacggaacgataaaagcgaaatctccgatcgatccatccatcattagcgaaccagcaatgggacctttgattgacatggacccttctgaaagaaacagaggcctgaaaaatatggactcaaaaggcgcaatccggtgccgacctggcctcctcttcctcccgaggtcaaagaaatcccgcaagcatccaagcacgcgcgcgcactagcgcctcgtcgttgagctaacctcgcggcatcctacgacctcatgacgccatcgccgcggcacataccccacgtacacctactccaactagcggcctgtccacacttgcccgaaccgaacaagatgccaacttttctgtttaattgtgagagcgacccgagtgatcaacggcgccatcatttgctctagaattgtacgatcgttgagactgcggtaaacttatgaaatgttgagtcgttgtccatgtacaagagatttgttttaagcgcccggcgaaagaaaaagaaaagagctttcatcgccggcgtgcgtgctggcgtttctacctgattgtccggcctgacggcgatggccatgacaaggtagaagaagagagagaaattattgtgattttccgtacacccatccatggcactacggcagtatatgtatatacatgtactcgcgagccacgcgatttatatttttttctggcttggagtgccttgcacatcatatgcgctggtagaaacgggatctaaccacgcgggctgcgcgcgcgcgcggtgggggagaggagatgatgagatacgatggagtgcgccgcgattgacggccgcatatcaggctgtttcttttttttttccctccgttctcacgtactctctccgtccacaagctatgggttttcgtatgggttttcgtatccaactttgactgttcgtcttatatgaaattttttttaattcgtacttgcgttgttgttagatgataaaacatgattaatattttatgcgtgacttatctttttaatttttttcataattttttcaaataaaacggatggtcaaacgttggacacgaaaccagtgtttgtcttttttttattggaacggagggagtagtcacgaggtgcccgggcccgacgatttgtaagcaggagaaggaaaccggaaacccggttgccgcgcaaggttggagttggacgacgacgagtcgacgatacgacggcacgacgtatgactgctcgattcgacaggagggccaagcgaagaaaactcgcctggatattgtggttttgtggcatgttgggtacatggttcgtcgaagtcgtagcctgcaaagtcggaatccgatggtactcgtagttcagtagcgatgggcgatggcctttctcgtgggagaagttcggcccaagtagaatgaagtgggccgagagaggctatggtctggccctaaacatggcccatcgctgcgttgtcgctcaccggtcaccaccaccaccacggccctctttctcctcgtgagtggcgagccgggtacgagttaggccgacggtgaggcaggtgtgcagcactgcggtcggaagttggtggtggcgacggcggtggcgaccggttagtgacaacgcggcaatggcgaacaactcggggcgcactgagggttgaatgcaggatatatttttttgtagtggtgccgctacaggcgatgaggagctcgacggcgaagcgggagctctataaggctcgaggagatggaggagaaaggaggaagggagattgacgttgtccttgctgcccccccaccctttgctgctggattgattccatgggaatttcgaaggttcatcgtcgtcacctctgcgcaccaactctggaggcccgagctcggtgagggaggcagatccagcagcatcgtggccctccaccaccgggcacacctgccgcgccgtcaacatcacagctaatgagaagttgctgcacttgtgcgggggcaccactatgcccgactctgactccgcctcaccgccgtcattgtgatcgaccacccctttgtctttcttgaccatgttcgttggtgggaccatgcgcgatcatatccaaccatgaatagctggggacgaccaccgtagggcggtgagccaactaggagagggcgaagaggacggaaagggcctctcccgctcgtggaagcaataccgcttccacttggtcttcttcttagcaaggatagcgatgttggagacgtcgtcgatgagctaccacgatcacttggctttaaaggatgaagacgattgtcgcacggattaggcttaggggatgccatcgccgccgtgtgcacaccccaattccttcgctgccatcgcctgctaccacccagcagccaccctgtttgtgctgagaagacaatggggagagaggtacgagcagagagggaaggagagagaggggattacatgtggatcccactttagtttttaaattcttttttatgagttggctgccatgtagaaactatgttagcgaaaaccactctcaaaacaaccaagggttttatttttcatggtttataaatagtcgggcttggcaaagtgattatacccgattttgcggttgaagggtatgaattggatccagccactacttaagggagtaaaagtgaacttttgtccgtaactcaagctgggcttatgaccccagctcttgtgggccggcctactactctactaggcatcacacctctccattgccagtgagatcaatgtacatccagtagcatgcaactccagctctgatccctccaggattttatatggtacgcggtgatgattccaacatgcgcgtgcgcgtgctcggaggcgtgttatgaaacgaacagcctcagcccaaaaaaccagcgcgtgcatcagcatgcgtgtaaactcgaaggaatctccgggagcgagcgagagaacaaggacgatcgagagccaacaaaacattccatccgttcaggttcagtagtagtagtagtagtacgtctcgcttgacacgctcgctggacgctggtggcgcccgtgaccgacagccgccgcaggcgccacgcacgggattaaaaccgagccagtgaaaccacaaccacccgcgcacgcgcgacgccacacgccgctggtcgtggcgccttcaaggcgagcaagaaatacgtcgcgcgcgcctcgcttccacgcgctcagccgctcacgcgccgcggatgagaggcaatcaaccgcgcgtccgtcgtccgccgcccggtgcgtgagacggtgaaagcgaggctgtcgccgcctcacaaggctaggcgcctctcggctttcgcagaatcgcagtcgcgctcttggcgtgtcgtcgtcgtcgcttccgccgcgtggcgctgctgtgttgcggtccctgccgtgcggtggaatgcggtaggcgacagtgtttcgcttttgttaatggctcctggctgcagggcgtgcaggccagcaatagccgtacgtcgtaagtgtgctgtaggcgtgcagtgagtgacgatcccgtgcgctcggacggcgtgtgccaccatccgttttatctccttggacgatgcgttctgttgtctgaattactagtattacgttctctccgtttcgcatttctcgttcactctgccagcgactcctgttccaaaacattccgtcatactgtgactttgtaatctgtaaacatttactaggtggatactacgtgtgtttggctaaaaacagatgaacagacgacgtagttattactccctccgtcccaaaataaatgcagttttgcactattcacgttcaacgtttgaccgttcgtcttatttgaaatttttttatgattagtatttttattgctattagatgataaaacataaatagtactttatgtgtgactaaatattttcaaaattttcaaataagacggacggtcaaatgttgggcacggatatccacggctgcacttattttgggacggaggtagtaactaaatactggtaccattatcagcaagtgagatgtgatgtcgttgtaataacctacaccctccgttccattttaagtgcaattatgagtttccgcacccaactttgattgcccgtcttatttaaatttttttataattagtatatttgttgttatgagatgataaaatatgaataatactttactcgtgacttatgtttttaatttttttaaaaaaaaattaaacaagacggacgatcaaagttggacgtggaaaaaaatggctgcctttaaaatgagacggagggagtatttgcttagagctcattcggttcacaggattttcaaaacgtatgaataggaaaaacgtaggaatactatagaaatatatgtgtaaacctatggattgaaaaactcagaaatttttcctatgttattgagcaaaccaacccaagaaacgcaaatattaggttgaagtggattattttttcctatgcttttccttcaaaaatggaggaatagaaaactttcctatagttttcctatagtgcattcctataaaatgaatgatagtttaaaactcatttctattcctataatatttctttgcaattcatttgaaacgaataagcccttagtttggcactcctatcagcatgtgtagcatactagcatctatcctagcctggtgcatgcactgtagcttcgtatactactactggtactacctccacctccgtcccaattcccaaattagatgttgtttgattttttgattctaacgtttggtctggtcttatttaaaaaactagtgcaaatgtaaaaacagataagttataattaaaatactttttgacgataaagcaagttataaataaaataaataataattttataattttttaattaaataagataagtggttaaatattttagaacgaaaagtattttagaacgggatggagtagtataatacacgcactgaaaacaaaacgaatatccacctaccttaccacgagtcgtaaactattacgccagcagtaacacatgatactctgtgctctctccagaatgattcatggcagcatacgagtagtagtattacctcagctgcaaaggctatacgtaggctgcgagatgctgctctgtctcacataaacaaaacactagccatgaccgtgacacaaggagggcgtatgtgatgccttcagccttcacgcatgagcaaacatcgagtggcaatgtgctatacgccatactagctagagtagcactcgatcagacggttaatttgaacattgaagtggatagcaaatgaactgaaagcaaacacaggattacaacaaagctgctggttttaagctgaattgagtagcgaggtcactttaacccgccttccgcagcttccctgaaacaacactcgaaaatgcacagccccacaaagtttgacaaggtagaaagaaagaagatagctctctctgtaaaacgataaaaatgatccacagatgaaaggagctccctttgcaaaaggctgcggctggttttgctctctggaagaacattatacaagaaccaatctaatcatgcgttctttggctctagaccagcaaagcacaaagctttctctcatcatttcgtccatataggcatatagccgatcactcattcactctccacgctttcacttcactcgcccactcccactctcactctctcaatccatccaaccagaaaaaccaccacgcgcgtgcgcccgccgcgcacgacgcacgcacgcacgcgcgcgcgcgcgagacgcgagacgagagagagacgatgcctccgcttcgccgccgtctcctcctcctctgcctctacgtggccgcggcgtcccgcctcgcgccgtgctccacggcggcggcattgccggacccggcgccgctcgacccggcgctgatcttcccctcggcgaccccggcgcagccagggagcgccacgatcccggcgttcccggagcagtcggacgccgcgtctgggacgtcgtcgacgtgcccgctgaccccgtccccgtcgctcctcccggccgtgacgtcctcctgcgtcgacggcggcggcgcgctgaccacgaggctgcgctgctgcccgccgctggccgcgtggctgtttgcggcctacgcgcccgcggcgctcgcgcagaggccggccaagtcggcggccgccgcggccgtggacatgcccgtgccgcccgacgactcggaggcgtgcgcgggcgccgcggaccgcgcgctgcgggcggagggggcggcgctgcctcgcccgccgggcgccaacgggacgtgcgacgtggcgttctgctactgcggggtgaggctgaggaggctgacgtgcggcccgccgccggcggaaggcgggcaatgggctccggcggacgcggcggcgaggaggctggagaaggactgcgcggagccaggcgtccccggctgctccaagtgcctccgcgccctgaccacggtgagatcgatcacatactagatcacatcttagtactactataccacgtactcctactttgcattaaaacctcatgaacatgatagtcctagaaacaattaaaacatttaacgcatctacttgaatgcttgcttctgttctgtcagctatgttcattaactgatcggttcagttcgacagttcaagttcagattgtcagctgctcgatcgtcagttaaaaaggttccttgcactgatcttgcaaattcatgcagtcctgcacagtgaacaggcaacgccgatgttctcatcacgtatatattactataaaaatcatattagtcactcacgagagtgataatactcatttgagccatgactgcattgcgccgttgcttcttagcaatgctcttcttggagacatggcgtttaatgaaagccatggacaggaggggagccactagcatacaaccaggggtaccgtctctgttgcctggtgtggcgtgtgtgtgccctagctgctgctgccctgccagcattattgaagcgagtgaccaggaatgatgagatctggagtccgggcctgttgcgtaggccctggagaatgatttgttcggaacatgcctccattcccctaccccctttgattgccatagcgtttgggggcacaattacagcatcatcgtcctttcccacataaggagtctcgtcgctattagaaagaccgaatcatttgcttaatttgttaacaaacgagccatttggcctccaacttggttaccggatagcgtgcagaatgttagggggtgtttgggagagaggggctaaagctaaactttagcccctctctcccaaacacccccttagtatagtagtgatactccactagaactctactagcgtatactatatcatctaaaatggtatagtagtgttactagtgtacgtacaaaatttgtcttttttttttgtttggggcagtgctctatatggattggtactgataggttcttccaaagatcttaatgcgtcgtaacatgcatggcacgtagaaggccatgtgtgccaacagtagaaagcagagagctcaggctcgggctgtcacttgtcataattctgtgttcatgacttcaagaatgtctgtagcgtaaggtaaattttactgtagtaatttttttttgttgttttacttcgtccggttggtgtccattaattgtgggttaacagtaccacggaactagtaaatgccattactgttcattctgtctgacgcgagcctggtgatgccgcagataaaggccggctctggcggcgccgccgcggcggcggcagcggcggcgaagaagaagcagcagcagggcggcgccggcgtgacgggcgaacgagagtgccagctgatggggatcatgtggctgctgcagcggaacgccacgcggtacggcgcggcggccaccgccgtgatccaggcgctgatggccgccgacgaggcgtccgccgcgggcgtcgcggcggcggcggatgggccggcggcgtgctcgctccccgtcgacgacatgccgctcgcggccgagtacgcgaggttcagcgacgccggcggcccgccggccgtgtcacgcctctacgtgttgctgctgcttgtcgcgttgttcggtgttgttgcctacgccctgtagcacttgtgattggatttatttttttgtcaaatggtctatcctgtagcccggtcacttggatctatataacagtatcgtcagaacttctgttctgtggcacattgcagaatcagaatcgatcaacagcacaaaaatcagtccgttttactcagtgtaaactttagccaatatactgtctattcgaaatccacaagtcagtgtaaactttagccaatatactgtctattcgaaatccacaagaaacaatctatttgaatcgagtttgaaagtctgaagacacaatggctgtcatgattcagcaaccaggttgccagaaaaatccaaattcgatatattgcatccaaaatcggatgcccaacttgaatgtagggctgcaaccaatcaaatatgacaaaaacaaaaataatgccactggcaaatatccaaatctaaaaaatgtcatcgagtagtgcgaatttcacaaaataacatcgtgcaagtgacatttcttagaaataccttctttgctagggttccatcaattccatcccgtttaatgcacaattcatcctatagcacttaatggaggtttgctaatgaaaccatacagataatggtatttctaagataaagtcacttgtacgatgacatttcatggaactagcacatgtcgattatatttcttgcaattagaagtttgtcaatgatgggcctgttcactttgttgccatttttaaccatatcatttttttaaaaaaattgccaaaaaaatgtctatgtttagtttgttgccaaatttgctaaatacataagaaatcatgccaaaattataccaaaattaggtaatgtttattttggctacaatctgaacaggcccgatattttttttggattttctcaacaaatttttgtgggcctctttgggtcgcaaccaatccatctatgaatgggcctggattcctatgggcctaaccggaactcgaccaccttatcctgggccagcaggagccagcccaacttgcggaaactccattccatcgtctccgactcttctgcgctcccctcttgtcccctacccaaacccccaccacgtacggcctccgtccccttttccggcgacggcgacggcactgcaccgcccgcgccgccggtgagggcctccactccactcgcctccacgagaggggggaaagacgacctcacctccgccgctgccgtccccggaaggcgcgcgcggtccggcgaggctctcgcgtgtccccgctccacgttaggttctcgcgcttcgtctctctctctctctctctcccgctgccttgcctctaccccgcctccctcccactcccgccccttcgccgccgccttccattggtaacccggagcgctccattagtgttgggcacctgctcgtgctctggtggtgtttgatggtgttcgtctccgcggtggatgaactgagcgctgcggcgaatcgggaaggttctctcctcgctggccgcacccatgatcgcctcctcctcagcgcaatcatggattaaggtatgggcgtatgtcgtttctcttcacatactatcccccttccttatctgaaatgaggtcgcttcacttcttcagggtcacaccaatcaattagcgagggtgttttctttggattttcgcagagggcgctctagaaggattccttccagaatgaggtattgattttgttaggttcccctccccttgtgggcaatttgtgcttgtggctagaatagcgagttagcaactagcactgaactgttcaggttgcaggtctagcaatgctcttggctctaagctcttccggtggtgttcgcgcgagaatcacacgtccgtcaggaagctgttggaggtggatggcacgtcagagagatcaaaactcctgaacaaagtatgtgccctgccagcaactggttgtgttcacttgttagtgttagccttcgattttgcaggcatcagtaatgagtttagttctgtatgtttcatctgttcaatcgttccaccatttgggctctaccaagtgaaagctatttatatttcccaagtcctctaattattgttgtgagttcaaactagtgcatagtaaccttgtttaaatacaatgcgcatatacttgtacattaacttccttgatgttatgacctttatagtttaagcctatgcaatagctctacttaatgacgtctggatttgatttgcacggctctctgcttgatgccactcttcactaataatgtcacacaactattcatctgtacttgctgtgaacagtgaacattgtctggattatttatgattgcaggtgtctgttttgatgggttatagtaatacacaagaattaattgagcaagaaagagcccgcagaggatctgctacagaattgatcagtgtatgcaaagaaattgagttcccagaaatgtgtgcaaagtttccatgcataaaaattggtgattcatcacctattgaactatatgctgctgctgctagcatgagtcagaaagaaactgtgctttctgaaaacctcacgaatttcatgcgagagtccggtggaaattttggggcagcttatgagttttctgacaaatgccatccattagatccaacccttacaaacgtcgatcacctatcaatcagtgaagagagttctctcacagcacagtttgtttctcttgaaccggcagttgataccgatgcttgtccagagtcattggcagtggcagatgctacagtttctgattctagcatcttggacagaagtataagatgttttcccggaacaactagtaggcaatatcgccagctagaggatggtggtttccatacggtactagcagcagatacgcttcagtattttttttttcttttgatttgatagaattcttagcatgcaatatatttcttctctgcaggtacggaaattgttgcagcattttccccggacctatgcagatctacaaaatcctcaaggttcaatagaagaggggcagtacatcatgctgtttggaaccgttgtatcttccaggtaattgaataatcagaaatatgatgttttccactgtcttcttcttcggcattaaacttgccatatgttaattatgtggcatctcccgagcttagtctttccataaaaatcttttggcatgtgaaggatatcatttccttatttgaattgatgccctcggattgttagtggtatttaatatcagatcattcttgttgagtaaaattcttaatccgataataaagaagaattgatatgggatgtgccatcctatcacaatgacactagggccacactcaacgtttggtcataataatccatgaaatttgtacagaagggcagtatagtttggaggagtggaatgggtatttatatagtcaattctcttaaccctgtaaaatttaaatgaagacctaccattactacaatttctggagtttgtaggggaattagtcagaaatgagtttatagagtaaatttgagtctgctgggggacaagaagattctgttaaaatcatggatcttttaagatgatcttattattatttctaaatattcatgtgaccgatgcccctgctgggatcatttggggagtataagttaatatttcaattagtcttgctccagtccaagggaacatatcctatgtatactgcgccgtgcacaccaactaacaaatgtcaccaaaacttctggaaaaaaatgtgcacgtacttccaatagtattacacctatatgcaaagtctcatcttcaaattcaatatattttagccgtaacataaaagacaaaattctgacagatatatactcttaaaactatcagatttttcttttcttttcgttatggctagaatataatgaatttgaactttatactttacaggtatatgaaatactattggaggtacatgtatatatattttttagaaaatttggtgacatttgttagttggtgtgacggagtgtgcaccgtaagcttgtgtgcatgggatacgttcccttgctccaactgctggccttgatcctatttgttggagttggtatagaattgtcttttcactctcttgactgctgtgatatgacagtgcttgtgttatagcatgtttgtaaaagtttcccccatttctttgatcttgctcatgtggtggcattcagtatattgtggtacaattttcgatgctattaaaaggacgttttactgtggatgttgtgaacacatagaaaagttatgttcatgtgtgtgagcgaaatggttaggttcaaaattattagttaaaaatattcaattcatagattggctgattattccctgcaaagaaagactgattactgaaaaacataattaagcactatgagtccaattgaaatggtactccctccagtcacaaaagattgccatattggaattttcaaagtcagtaagatgtaactttgaccacttaattcttttgcataaacccaaatgtagttacataaatgtatattatgaaaaattttcgtataacaaacttggctaggtcattttcatacgccaaaaacctgtactctaaacaataattatcgtttgttttctcaggggagccagacttaagcacactttaggttaccttgaggttgttgttagttgttcaataatcgagagtgagttaagctcttcagttaagagttgtaactctcaagcagaacaaaagaagacaattcatttgcacctcaagaaatttttcagcggcacacgcttctcttctccatcttttcttaagtgtatatcatcgaagtacaaagagggggatcttgcttatgtcagcggtaaggttggtgaactaacataccttttcctgttacatgctgcttgtcagacctttcaatttgtctttatttgttggtgatgcttcactacaaaataattgtaatcctaaaatttgtgttggtgcagccgcacatttgctttacaatgacataaaagtagctctgctatacagatgttttcacttatgcatgtaatggactgcactttgtagcctcacagcctatatgtgattattaagcttagctgattttgtttgcacagatcaagaaggcgcttactaaagaccattatgatttgagagagtacactattgacatgcttgaagaagaggaacaacaatgcaccctgcttgacaggaaaccatatcctatatacccatcaaaagcaggattgaaaccaagtttgctgagcctctccatctcaaggtcagtgcaaagcttgtgtgcttttctagtttctaaatgaaagctgagtcggtgggccctaagtgatgttcctctaagttcacagctattttaaagtgatcatagttgaaagatgccgattccccattcctaaaatatgattcagctaaattgtacctaagtaatttaaattatgatgatacttaagggatgactgcaaagcccaaaggataaagagtaaatcaccttaacttaatatgaaatgcatgtagttcgatattattattttccatctgaatatgtaggagtaataatagtttacaattgtgcacagggccttgaagatgctgacgccagacattgaccctatgcctcatgaagttcttgttgaattcaacttgcccaatctctttgatgtgagcaaaccatctaattatagttcccttactaaatgctactcatacaagtggaacctagagatggatggactgtcggattttttcttcttgctattggatatctgtgtggtaatcacacgtgtgtgctaatatattaaaatcactggatatacgtgccaacatgttcatgtactctttgttgactattacaagatatagcttcattctatctgtttgaatttctgttatatgatgtcatcatcatgtgatctgtatgccctcctaaatgctgtcctcaatattcgttttggttgttaggcttacatgggaatccacaagcctaagaatcgagatgaagccgattttgctcggagaaggcttattttcgatgatttcttttatcttcaggtattaccatatatttctttcttgacataacagtagaagtagcacagtcatatgagtcagtaacagtatatatcaccacccctctcccttcagatggtcttccttttcagtgctgtgtatttaattttgttgtgtgtgggtgtgtgtgggtgtgtggggggggggtgaatggatgggcgggcactcgcatgtgtggcagtggggtgggggtttcagcatttttagcaatcttcaaagtacaactccaacggtgatggcatctatacaggagtgcatttcctgggtattatttttgttatcatttatatgcttgtcagcaagcaatatttttgttttgcttaaacatggatatcgatttgcgcaaatgtcatgtccttcaagttcatattatcgcatcttgtttttaagtgtgcaattaagcatatgcaatgatggaaacatttatcatcgtttttcagttgggaagactgtttcaaatgcttgaagctgttggtacacgggttgagaaggaagaattgttattgaagtgcaaaaatcatgagctaaatgctgttggtgctgacgagtggtctcctcttgcaaggaaattgttaaaagttcttccttatttgcttactcctagtcaattgaatgctgttaaagagattatatgggatctcagaagaccagttcctatgaacagactcttgcaagtaactattaattgcacatttcttggttcattaactttcttgctcttgtttctggagtctggacttgtttaccagtcagttgcttgatgctcctctgtaatcaactctagtatatcttggctctaatatcactggtctactattgcgttgttttattttggccagtttatttcaaatgtttcgatcttaagcaaaaatatttgaaccaaactattttctaccattcttaagcaccaagttcgtggacaagaaacttgcaattgactggatgtagcattccatttttcttggggaaatggaacatgggggtatacctcatatgggggaagaaaatcttaagtaccaagttacaggttctggctgtggtattacatagtgaattaatgattctgttttcctttttatatataattggtgttcttcaaataacaactattggggcttatatgcatcttgctgaagacttgaaagccttctttctttgacagggtgatgttggttgtggtaaaaccgtagttgctttccttgcatgcatggaggtcattagctcaggatttcaggtatctatactacaaaccaacatccttgccttatgtactgtatataaaaggattttatcaactaaaaggacagcttactgaagcaaactagatgcttaatccaaataggatatacacgaaaaatgattatcttcctcctagttgtactcttcagttcttcattaatgagatgttagtctaacatataccttgtaaaattatttctaggctgctttcatggttccaacggaggttcttgccctccagcattatgaacatctaacttcattgctggagaagtttgatggagatgaatgcaaaccaaacattgctttactaactggttcaacttccacgagggaatcaaggattattcgaaatgcaagcattctttctagactctcaagttcccatacgcatagattcatatatttatgtgttattgttattctatggcagggtctcaagacaggagaaatagcaatggtcattggaacacacagcttaattggtgataaaaccgaattctcagctttgcgcatctctgttatagatgagcagcagcgctttggtgttgttcaaagaggaaggtttaatagtaaggtaatttgctgagcatttgctatttacattgaataaaaaccatacacgtcctttttgactgttactttttttgcggggactttttgactgttactttgctcctgcattgtcactcattctgtaaaccttgttgttgaataaaatcacacacatccttcgtttacttactttgctccaggattgtcacccattctgtaaactttgttggcaaacttagaaagaaaattgctaattactactccttccatcctaaaacatagcagcttttagcgttcaaaatttgtcccaaaacatagcaacttctccatgtacttcatcatctgaaccaatcacaaccatctctcatttaatttccccacctacttcctcatcaaaaccaatcctaaccatctctcatttaatttcacctctctccttaatctccatgaaaaactctagaagtgcttatattttggggcttagggagtaagaagtatgcctctggatttccatgttcgtgtatcttattttgtggtaagatgggccagagcgttcctactgacttttttcttctttctgttcttacaaactagcatatcactgcagaaaatgacccatcattacaatttgctattcttgctgttattacaatagctagcatatcattgcagaaaatgatggtaataacgggttaatgataattttatttaataaaaatcccaattcaatgggtaatatgctagtgattatataaaatgctatggtgaaagccttcaaggagtgtgctgtagttctcaaggctgcctaattgtccaaaacaaaagataatgtatctggtacttacacttgagtatttgatatccaaacctcgttgcataattcatgtctttcttattttggtttcaaatttaacatagttaacatttgtttgttaatacaaattactgccattcattacagctatataccccttccacgaaatcgagtgatgatgatacaatctcagacgagaattccgcttctgaaatatttatggctccccatgttcttgctatgtccgctactccaatcccaagaacgttggctcttgctctgtatggggacatgtcccttacacaggtattttacaggcttatggcatataaggcttcgttcgtttcttctgtttggtagttgattttctgcacacgccaaacgagaaagctcattagtacatgattaattaagttttaactattataaacttgaaaaatggttttctttgattttttaaacaactcctatatagaaaacttttataaaaacacagcatttaatagtttaaaaaacatgctaacagaaaacgaggaagttgaagttttgagttgaagaaaagaacatagcctaaattgagtattccaaatacttactcattggaagtaaaatgtcatatcgcgtactatgtggggcacagggtgaaaactacatacatcgagggactaattctaggctagcacaattatatctttaacaactagtagtccaccctgttgttttccaggatccgctactttatgacttcacatattggataggatatagtgcaaaaatgttcttgcatttttcatttttcatgttccaggacctgttactttaacaactagtagggtctttcatttttcacagctatttcaaatctttacaattgtgatccacgtttcttatagatcacggacttgcctccaggaagacaacctatagaaactcttgctcttgaaggaaatgatgctggttttgaatctgtcttccaggtgatgacatgacttcattcaatattttttctttttgtttcagatctttgttgttttccttttctgtcccaatctgcacttggatatggttgggatcaatttgcttatcatttttaaatacttatggcttgaagatgatgagtgatgaactggttgatggaggcaaggtctacctcgtatatcctatcatagaagaatcagagcagctaccacaacttcatgcagcaaaagccgagtttgattccataaagcaaaaatttgaaggttatccctgtgggctgttgcacggtcgcatgaggagcgatgagaaggatggagccctcagcagttttagatccggggaaacacgtattctcctctcaacacaagtgattgagattggagtcgatgttcctgatgcttccatgatggttgtcatgaatgctgagagatttggaatgtctcagctgcaccagttaaggggtcgggtagggcgtggcgaaaggaaatccagatgtgtgttcctatgctccactcctagcgcgctgccaaggttgaaggtgcttgagaagtcatccgatggattctacttggctaacgccgacctgctactgcgtggccctggtgatctactcggcaagaaacagtcagggcatcttccagagtttccaatagctagactggagattgatggcagtattctacaagaagctcatcttgctgcacttgtaagttcatttgctaaaccccaattcgtgttgctattaatgatcagacaactcttctatcactgtagtatataacttatttgttcatgtttttaaaagtagcttttttgtggcagaacgttttgggaacaagcaacgaccttgcacaatttccaggactaaaagttgagctcagcatgagacaaccgctgtgcattcttggagattgacctgtgatctttactgagcagacagtgcagtgagagtgtgacactgaacagcgttgtagtgctcattgggcaaagcttttgcattctggcttgtgcggtgcaggtgaacaatcctttttcagatgctggcaagattgcaagttactactagtagtattttatcaaacactttttttagcaatacctgaccagtgatagatgaaaaaaaaatcagtaacataatttcattatcatcccaaaaatgctttcgccaatttgaatgatttccttatttatcatggcacagtttaaactgcacaaacacactagcactactcctacgtttttactgtacaagcttcccgccatgacggtactggcatgtttgatgtgacgtgacgctcgataaactcggtagtcgccgcacgagacttccacgtgcggtctagcacacgctcctctcgctcttccagcgcaccacgctagccaaggcgtgccatgtggatctttttccacgtgtcgtattttcattggactggtgactcaattcgtgacgttcctgccacggtcttcttctcacctttttcacatgagccctcaattttttctacatattcaccaagaatccaaagcaccttcagcagcaacgcacaactcgaaatcagaaaaaacctttcagggtcataatcgaaaaaactccgaacgcaagaaaaacaatcacaaaaattgcaaatatagcacacgcccttctcctcctcctcctccccgtcgagatcgttctccccctcccctccttcgctgctctctcctctccccttccaccgtgtgtgctgcatccgccacactagtcccagatctccaaaccctaacccccccaccccgcatgccattctactagccgccgctcgtcatggcgccgccccgcacatcgggtctcctcctcctcctcgccgcggtcgtcgcggccgccgccgtcgtcctcgtcccgccggcggaggcggcggtggcgagcatcgacctggggtcggagtggctcaaggtggccgccgtgcacctcgcccccggacgcgtcccgatcgcggtggccatcaacgagatgtcgaagcgcaagtccccggcgctcgccgcgctcgccgacggcaaccggctcgccggcgaggaggcgtccggcatcaccgcgcgccacccgtccaaggtgttcgcccgcgcgcgggacctcctcgcgaagcccttcccctacgtgcggtccgtcgcggaggcgctcttcctcccctacgacctcgtccccgacgcgcgcggcgccgccgcggtccgcgcggacgacgggcaggtctacaccgtcgaggagatcgtcgcgatggtgctccactacgccgctgggctcgcggatgcgcacgtcggcgctcctgtgcgtgacgccgtcgtcgccgttccgccctactttgggcaggccgaacgccgggccttgacgcaggcggcgcagcttgccggagttaacgtcctcgcgctcatcaatgagcacgccggggcagcgttgcagtacgggatcgacaaggatttctcgaacgagtcgaggcatgttatcttctatgacatgggcgcaggtagtacctacgccgcgctggtgtactactcagcttacaaggccaaggagtttgggaagacggtatcggtgaaccagttccaggtacaattcgatcttgcccaaggtcttttagttgttcaattttgtccgtcgtatgcttactcaaaagtccactgaaaacccctttttttacatcatctttcacatgcctaagcgatggaagatctgacaaatatatgaaaaattgagcttgctaaatgcctacattacagagatacagaatgccagaatctattactaatttcttcagctaattatctacaggttaaggatgttagatgggactccaaacttggaggccttgaaatggaaatgcgcctggtaaactattttgctgatcaatttaataaacaactcggtaatggagttgatatccgccagtctcccaaggcgatggctaagttgaagaagcaagttaagcgtaccaaagaaattctgagtgcaaatactgctgctccaatttcagttgaatcactatataatgatctcgatttcaggtgcgtcctcaccacttgcataatcttcacacatgtaatatggaccgatatttataaattcataaatggaaatttacttaacatttttggattctctgttcaagccttcaagataacgctctcgagtttaattggttatgaacaattgaaactttgttgaaaattagagatgcttgtcagcctggcaaattcttgcatagcaacttactatgctggagtagcatgcatgctaggtggctggtgctttgtctcttatctgctaaaatgacctgaccggtgtttcaattaaatcaatcaccttgttatctttgaattacatgaatgcaattccattagaacaaattcgttaagagctacaaaggttgtttactgtggcctgaagtgtagctactccattgatgttctgcattggcctttgttgcatatccattgattgtacggaacgtcggaacctggaagatagtgaaacacactggcttcttaatctatacagtagttgccaatattaatactttgcatatccattgattgtacagaacatcggaacctggaagatagtgaaacacactggcttcttaatctatacagtaggtaccaatattaatactttgcatatccattgattgcacggaacatcggaacctggaagatagtgaaacacactggcttcttaatctatacagtagttgccaatattaatactttgcaagcatagtcgacccttcttccttactgtattgttctataatggttgatgttctgccttcctttcatcttttcttgatttctttctgtacaaagtaaactttttctagttttaaatcatgatcaggagtcaggacaattttctaggttctacttgttgaattaatggtcgcttcttgttacaggagtaccattacacgtgaaaaatttgaagaactttgtgaagaattatgggagcaggctctaactccagttaaagaagtgcttgcacattctggaatgaagattgatgatatctatgctgtagaattaataggaggagctactcgagtaccaaaattgcaggtgattaaactgaactcgtttttatgtttgaccttgtattgtggggctctaatggcattcaggcacatgactgccatgtttttatttctctcttgtcacttgattctcatcataagtttaatacaatccattacttttagttaacatcttaaaaatttgctatcatatctcaaaggcatttgttaaccacggtaacctactatgcagatgacttaactgtacttctgaaacagttgtgcttccatcattcaccttgttatttttgtaataaaattccattctcctggtacaggctaagctgcaggaattcctgggaagaagtgacctggataagcatcttgatgcagatgaagcaattgttctgggtgcctcactgcatgcagctaacttaagtgatggaattaagttgaaccgtaagttagggatgattgatggttctacttatggttttgtgtttgaaataaatggcccagattatgtcaaagatgaaagcactgatcaattactggtgccaaggatgaaaaaattgggaattaaggttataatgcacctttcttgtttccttttgattatatgcaaaaaaaaaagttttttttaaaaaataatctagcttgcaattgttttgttgtctacagatgttcaggtccattagacatactaaagacttcgatgtttctatcagctatgaaaaagcttctgaactgcctccaggtgttacatcacacaaatttgtggagtattctgtatcaggcctgacagatgcaagcgaaaagtaagcatgcataatgcatatcatcttatgtactttttttgtgtcatggtactgcttataacaagctgaacatagagtacctttatttcaactgctatttttttgggggcggaacattccatcttcgaggctgcagtacatatgtttattctatttctaaataatatctcaacaccattgccattggcaatttgtatgtgtttaatttcactgcatgaatttaaccatgtggttatttcaaacaggtacagtagccgcaatttatctgcacccatcaaggcaaatctacatttttctttgagtaggagcggaattatttctcttgatagggcagaagcagtgattgagataactgaatgggttgaagttccaaagaagaatttaactctagagagtaattccaccagtcagactttgtcttcggaaggaggagcagctaatgacacatctgacagtaaggagaatgtgagttctgatggggatgcaaataagtccagtgctccaatagatgagagtaatgcacaagatattgttacagagaaggtgctcaagaaaagaacattcagggtcccgttaaaggtaaagatagaaggtcataaatctggtgttaatattgacagaacatgacttaataaatatgttgtccaatggcaggttgtggaaaagatggctggtgctggatcaattctttcgaaggagttgtattctgaagcaaaaactaggttagaggcgcttgataagaaggatgctgaaaggaggagaactgctgaactgaaaaataacctggagtcttacatatactctatgaaggagaaggtaccttctgttctcttctaccttcagtgttaatagcataaaacatgttactgccattcacatgacccctcttgtttcttgatatatctgaaatctttgagggtattatattcctcagaacttcagctttgcactgataataggaactccattgtctacataaatctagaaaaacacagaaaagtttcataacgtttagcacagttattatttactaggtgctatacttatgtttgttgactacttgttttctgttatttggcacatcacagctggaagagaacacagaaattttgaccgtctcaactgaacaggagagggaatcttttgcagagaaacttaatgaggtctgttcaataataatcttctggtgggtttcatttgtctgttgaatcctcatgctgagattgtttaagtgcaggtacaagattggttgtatatggatggtgaagatgctcaagcaaatgaattcaaggaacgccttgaccaacttaaggccatcggtgacccaattcttttcaggtaacttgctctgtatccacttaggttcatataggtcattgactgacattgattttttttttctttattgcccagattgagtgagctaaaagcccggccaacggcttgtgaaaatgctagattgtatcttgctgagttgcaaaaggtatctatacagaagaccaaacaatgtttttgttgctgctcaacttcatgattgttgtgctactctattctcatctgtaacactttctggtcttgcagattgttaagaactgggactcgaacaaaccgtggcttccaaaaaagagggtagatgaggtaaaccagtgagcttaatgaagttcgataaattcattctggttatgatgtgattctcattttattggttgtgatgctatctgggtctaggttgtaagtgaagcagagaaagtaaaaacttggttggaggagaaggaagccatacagaaaaggtatgctgagtctagagccaacacaatttcgcgagttctacatttaaatgtgtatatgtgtctaactcccatttatcatattgcagcacccctgtctacagtccacctgctttcacatctgaagaagtctacgaaaaagttctggacctacaagataaggttaggaagttcatattaagattctagaataatatgcacatgtttcaccgctctcaaaacattggggattcatctttgtctgcaggtttctagtgtcaataggatacctaaaccaaaacccaagatagaaaagaaacctcccaaggaagaagagtctgctaacaaagagaaaactgactcttcggaatctgaatccaaagaagctgaatccacggaaacatcgtcggaatcagctgcccctgaagagagtcagtctgaaccacaaaagactgacgatttagaacctgaagctcatgatgagttgtgattattagcgtgaaccttggcaccccgtaggatttgttgggatgatactgatactccaagaaggcactttgtcagaggcaaaattttggttgctcaaattttctcatttgtttgacggccaaaagatgaggtgtaggatttccgtatggactagatgctataggaccagcagaaaggtgatccatagcttctaatcgcagcttctaatcgctgtatagcagtattatggtctctatggcatgctgtcaaagttaatgcctcaaaggcttcgacttcacgactttgtagttgcattgtttgtatcgaactaatttgttttgatattgctgagctatagaaattttacatcgattagcagtcttatcatttctgttgtttttgagagcttccagttgaatgtgtgctggtttgcgtcatgtctatcattatatattgtgtttaaatacgtgacaccggtgaatttagttattttttggcatgcaatttttacaacaattgtaaaaataatatctaatctattctattatatggtataagtacttataaagaaaaatccacccatatgattttcacgtttccaaactaaataccttgaaaggtactattgaatttgaaagtattaaaaatctaaccaaataaagtcaacagcggtcatatatttgaatacagagagtatacctcagaaaagaaaatcattctccctccaaaaaaagaaggcaatgctgctggttgtgttaaaaaaaaaacattctcctccagaataaaaaaggcaatgatgtattagcattatatactggttgtgtcaaagtacgctgtgtacaaactcggctacatcatgtggtcatcaggagggttctaacttctaaactatcaggtcagcaggtcgtgcagtgactcgggactcgggagcgccaacatacacaggacacggtcatgcataatcgttgcttcctcttactcatgataaattcatctaaaaaagaagcatctcaagtagtatcaaactccacgatgcgagaagtaggtgcaaagaatcaccgtctcttctttcaccttaacttctttcctgttgaggtagcgcagttgttagtttctcaaccagaaatcggcaaaaataaatgcagaaacagattataaaaagcaaaccatggtgggaagatgtgaataatgtttcctgctagaagatccacgttgtcacatatcttgggactgaagatgatggtccttttcacgctgctattatccatgtcaagatctgttgacacttcccctgttgtggccaactgaaacacaagtaccatggaaacatcagtagcacaaaatgctggtaatgcaggatttgagtgcttcacaattggtcaaaatgaacaaaaaccaaacagttctttttgagagatgaaccacatacattgctcttctccatgaacaagcagcggcagattgttagctttccttccagagaccttgacaaaatctgaactgtaaccccctttggatcgcctggaaatacaacgagtagctacttcagcaatgtgtatatgcactagtgaagcttatttatgaacatgtacgtggtagtacagagctacagatgattaaggcgcacctaaataatcttgctctctgttatactgtcttaggaactcagcatgcctatctttctccatctgcagaatttgttgcatccttccataataaccagatctgccacagagatacataaaacaaataaatgtgaacaaccagagatatttaagtgatcattcggaagataattatcaggacggttatacccatatgatctcacgggcagtgtaaaacagtccatgcttgttgcattaaatacttgttgaaatatgtcagccatagtttgccccttgacatctttgttgatcaaagccaggttgttttgagcatcgtcctattgcaggataaacatatcattttgaagatcataatagagtaagtatttatatcattggttatgttaacaacctacttcctcctcgctagatgtttcaccaattacatgctccaagggattctcggtctcaagattcctctgacctagaagtgcaagtgttctcttcacagaagtagggacctttggcttttcttccttaggtctggtgtgttgatgcaactgcgttgagataatatttagagacaagctaatcgttgtctaagaactccaaataacaaaatagcgcaactaaacactaaccaaaaatggtgtcccagcagaggaggcacttctatcctgtaaactgtcaagaagttcagaaattgaaacatttgctttcttggttgaacaagcaaactctgagggcaaatcttcagtttcctccttgatattttccaactgctcagccatcatggtttcaggagctctgtttgttggcattactgatgaaacttcttgctccccaatgtatgggttttcagtcttcacattcagtgaaacagaactggatccacgtattgagaatttgagcctgtgttcaccttttctccctgtatcaatgaagaaacgataaacaactcacagtgtaaaaaaacagaaattgttatgtacgaaagctcctaaaaccgaattcctcctttatccgtaaggcaaacaagaatatacatatctatgcagtagataaataggatttatggcaacgtacttttgcctgttccagcagataggaatgatatactaggaggaactttgtgcacataggctagctcatcggcttcttccagaacttcatcccagatggttgattcatctggcaccaccattttgttttccttctctctttcttttgaagcagcacaagctaatgacagtcttgttggtgcaagaacatcctgttaatatataaaggcacatgttcagcaagcactcatacgccactgctacaagtggaaatacactattagtagttaaaacaaacttttgttaatagatgccaaatacatttgttagaaaaaagaccaaaaataaaacaaacttcttgttgtacatcttataaagtggtctggtgccaagagaaaaaaaaagaaatttggaatctctctaatttcattgaagacataagtgcatgtcctgccaacctgaagtggtgttaatgaaatttgcgggcgaaaaaaaaaggtacagcagcataacatatcacatttcacatgctgtagcaacatcagcagatgcagcacctcatcagatattgcatcctcagcagaatcagacacatgatcagagtgttgctcggattgaggaccagcgcgctgatcatcacggaagctctccataccaacgctagaaccggtccatgggcgggtctaacatgggaaactttttgggaacaaacaaactgttatcagtatcaaggttaaggcaaatttccagaacagaagctagggttaacgcaaattcgataaagaaaaaagtgcgtgggtagagagagatatgggaaagaggatgtgcgcaacggatgcggcggaagcagcgggacgaacgaggggcgcccctgctcgctcgcgggatggatggggatcggcgcaggcggcggtggcggaggatgtgctcaccagggatggatgcggcggaagcagcaggacgaacgacggcgcccctgctcgctagcggaatggatggggatcggcggcggccgggcggcgccgggcaaacgacgatgagtgacgagggtccgaaagggaaatttaactatttacccctcctacgggcaaacggcggccaagcgtctcttcatgtttttcagtaaaaagtgcttgccggtctgaccatcccggttttcattcggttatgtagaaaattgtctagtttaaccaatttttcgcgggtcaattatatcattgaactaggcattggttttgatttttttttctggttaaacgagcggaccgattctgtttaataactaggcattttgtaagtttatctagaagaatggcatatcacgagtgacggtccgtaaaagcaccaaatagttaaattccccgtcgggaatcatactcatttggatacacacaatacttctcaagttactatgcaaggtccaatcgttagagctcgcgcctgacaattaaatttacaggtaagctcgttcctaaatatttgttaaatatttgttgatgtgattttgagaatagattgttacatacatgcccgggccaacacgaaaatacatggcccatttgacaacttacacgaggatttggcaaatttatagtcattcttcttgtgcgaatgagatcaattaaggcactcatcgcacctaatcctatacttacatagttcatccccactaaatgtagttaatgctatttctctcttctcccattaagccacatcgtcccaattatttctagccttttgatgatagatctatggttcaaattgtctcttctttcttctctcataacaccatgcaatcttaattatttttagactcaaaattcataagtatcaatttgttttagttttaataattatattgaatcctatttgtacatattatgtaacttaattccccgcagcaacgcggcagggtattcatctagttaacttgattagtgtagaattaaaggaaaactaccttttctttaaggtgtttccttccataatagcaattacgctccagccaacactaaaacaaataacactcttttcccaaaagtaacatgcaagtacaatataatctaaaaaaacatatgtattttcttcttgtttttattatatcaatttcaagtagcgttgttcgagacaattttttttcaatatgtagaataaggataaaccgatctcacggggatatgtgttgcttatctcattggtgaaaaggaaaatatttttctcactaaatcaacactagttaagagagttaattaggagaaattaatctcagttggtagaatttctcagctggtagaaacagatagaggttgatatttctggaactacatcaggtggttctagcatcaactctaggggatccacaccccacgaggagtcggagttgacgtcgagtcaacgggaaaatatcctcgaggtatgccatacgacaattttctctttcttcttaggcacaattacaccaggatacttggccacctgggaatataacatatacattttctaacatttgatacattttataaaaaatattttttctttttacttatatgttattctaaattaatattttaatcaaatagataattatttgtttcatagttcctatatgacaagcacgaaaaattatgttctaagatttaaaattatagtaaaaatatatggttgaaattgtaatatatgtgattcacattatacattttgatttttttttcttggaaaatgttgcaccaaaaaatatagctagtcacgattaatattacttaccgatgtaagcagactaccaataaaaataatataatcaaatcgtttcttcatttgattcaaactaatataatcaaataatataaatttgttctttaccatagtgtaggtaaaactaaaaatttaccacattgattttattttctttgggtactttggtcctgtttttttggttggggtgtttgggggctcaatctccgccgatgcacccaaacatgcagccattcatcatcgactcatcgtcgcttattatttactttgttgaaaggttcttgcaaatttcgtagccacaggacataataagctgagtagatcaacaattgtaaagttgttcaagctgatatcgtgtcatatcggttcatattctgagcagtacgcactgtcaaatacagtgtcacagtgaagactaaatgtcagcctctgtattagctgtcttttggtaatgaattaagcacttcgatgctactacaggtgagtagcttcttgccaaccatgcaggaaatcatttgcaaaatatttaatgtgaattctctttgcacttccttcagtcggtacacgtcgttcccagaagaaactacgagtgtgcatttcttgccacaatgtacggcaatctaaccatagagtaaacttcctacttactgataaattatgacacttccttgtcaccatttatcagaacctggaaagttggaaagaaactagagaactttggagtgtgctcagctccatttgcatgacggtggagatggttttgtcagattcaagatgggttcttcttttatcagtctcaagttggatttgatagagttagctgaaagtgtgtttccctattacagccgatggagaaaaccacaaggccaatgccacaaaactgggtgtcatagagcaaattttacctagtagaaatgggagaggatccctctctttctcaaacaaaccaaaaagaaaatccttgtcaccaggatgtcatgttcatttcccaacgccacatcatgtcgaaagggagaacaaaactcaaagaaaacactggaatttctacgcaagaaacgcatgcaaaagaaaaacattaggagagtcaagtttaatttaccaaactaccttaccaaatatgtcactacattgtacacctagctttgagccaatgctttgcaacttttactgatgctatgcgcataatgttcctatagttgcagttgcaaccagaaaatcaccatcaaccgctactcagctacttgggggcaaaatgttagcttttcttcccctgttatatttaaccacaaagaagaggtaaaaatacctagtgcgccttccattttctaagtaggtgatcgtggatatgtcctttataaaccttcatcagacattgcttcagctttgacattgtggaagagctcaacttgatacatcgatcaatcatgtcttctgcatatttacatgcctcgggtaacctctcatcctttagctttgatacgagcatgttcccactctcctccaatggtggaagcccattctccaccatgcatttccacaacttgatccctgaatcccagtctcgtgtatccaagaacatacgaagcgcgagcgaacaatttgcctcattgggccagaactcgttcttgaccatctcactaaatattgccgacgcctcccggagtttcctccccttcagcaagaactggaaaaccatattgtatgtgtccgcatctggaaacactccatcaaaggtcatctcatcaaggtactcaacaatcacctcaggatgcccaagagtgccctgcagcatgatcattgtgctatacatttccttatctgggatgagtccccgccttacgacaaagtcgttccagagcaccaccgcgccgcgcaattcacgcgccttgaggtgtgcggccagtgcggcgcggaagaacttctccccaggtgagcacctctgccggtgcaagatagcaagatagtccatcgcatccattaacgctgtggaggaaccacttgaaatcagtgtagtgaggaaagaatcataggcaggaacattggcaggatcgaatccgatgacgtgccgcatctcgtcgaacacctcgcgtgcaacgtgagggtcgccggcagcctcgcagccctccagaaggatggcgtaggagtcggcgtcggggcgggtgccggcctcggcgcgcgccacggggatcgcggcgcgggcgtcgtccaggcgggaggcgcggcagagcgcggagaggagggagttgagcgccggcgtgtcgcggtccatgccgtacatcggcagctccacgaacgccctgagtggggagctggccgggttggccgccagggaggagaacacggaggcgaaggtggccagggagagcaggccctgggtccgcatggaggagacggtgtcccacatgggctcgaacaggcggttcttgccgaggaggtcgacgacgaggttccacgagtagggggagtgctggtggcggaggtgccggtgccccgcccatcggaagaaggcgacggcggcgcgcgggtgggcgtaggagaaccggagcacctgctcgacgtcggaggaggtgacgcggacgtcggcgtcgtcgagcgccgcgtcgacgtcgggtgccgaggacgccaggatctcgcataggagacggatcttcgggggcaggtcgggggcgtccctgtaggtggggaacgccggcgcggacgggtcgcgggcgcgcttcgccgccggcgaggcggcggcgaccgagtcggacggccgctttggccgctggtcaggcatcgccgccgccgccgccgcgccggggacacgagggctagtggtggaattgggggaggagagaggtggccaaagtccagaggtggggtttttgccctatcccaaagaaaagaaactttcttttctttataaacggctgaagcagcgggaggccgagggggctcgcccacacgcgcggccggagaccccggaatcccaatcggatcgcgaggaaagccactgagagagtgtggatggctccctccttgctcgcctcggcggcgagccaaatcctcgccgctccccgccggggaggccgcggccggcggcgtctggtcatcgcctgctccgccggtgccggtgctcctcccaagctggtgactttcctcgggaagggcggctccgggaagaccaccgcggccgccgtcgccgctcaggtgaaaactttctctccatcgattgcgttcgtcgttatcttgatggaaaattgtactagtttggtgtgagctcgctgtacattacttagatttattgtagtatcatttatcgatcattagccgggatgctccatgaattgaaccgagtacaatgtagcatgacattaggtaaaattaaatggcgagttcatattgccgaaatactgaatatgttctgatggttgtatcaattcctggttagttggttcatgaaagaattgcctttaacttgttcttttccacgttttagtattatgcaagtgaaggcttgaagacatgcttggtcatacagtcccaagatcccaccgcagagcaattgatgggttgtaagatcggtaactcgctgaccgagtgcgctgccaatctttccaccatgaagctggagactagtaaagtaaactactatcttgaaagtgatatcctctatgttttagctatagttatatcataaactggaatgatattctgattcatgatgctgaagaatgttgtatggttacattgtagatgctgcttgaaccccttgaccggctaaagaaagtggactcgcagatcaatcttactcaaggagtccttgaggcggtaggcaatttaactttgctgtattatgggacatgaggataaagcagtcatttggattgatgatttttcatgggataggttgtaggggaggagcttggagtcttacccggaatggactcggtctgttcagtgttagctcttcagaagctgcttaacttcttttcaactcaaaggaatagttcacaagaggaatttgatgtggtagtgtatgattgcaacaatacagaggaaattctacggctaattggtgctactgagagagcaaggtataggttttccttgctccaacttcaccttagcttcccacaggagatagtctctaaacttaatgctggtgctacacaaaagacaggtcttacttgaggtatgtgaaggatctagcagaaaagactgacataggaagactggcttctccttccgcgatgagactaatatacgattctgcaaggccaaatggtaaaactagtgaaggaagactgagttcagagttatggaatgatattgaacaacttattcaggttaattttcccgatttagttcttttgtgcagcaacctagtagatatgtgttcaactagttagctgaaatctgcttttttttttcttttagagaatatcggtttggtttgccgatccctcaaaatttgcatgcttcctcatcatggaccctagaagatcaatctctgtatcttctgcattgcgatactggggatgtacaactcaagctggtggaaatatatgtggagcatttggttataccgaacagcgtttcgaaattcaccaaggagttgcagagaagtttttgccgatgactttctcgtttctgccatttctgccaactgattcttcagcagattggagcagagtgctgaattctttgagccaaaatgcaaaagatttactgaggaatacaagcaacaaagtatacccttcagttagttttgattctgttcagaaatcggtgacccttttcatgccgggctttgataagtctgaaatcaaactatatcaagtaaggcagttaccagtactctttcttgattcaaaggagcacatcatctcagtactactcatctctattggctgttttcgacaatctgttgttttgtctgaaaaatgcagtatagaggtggatcagaactactgatagaagccggcgaccagaggcgcgtcgtaaagctgccgccggcgatgcagggcaaagttggtggcgccaagttcgtcgacaggaacctcattgttaccatccggtagcagtgcggaccagcagttgtgtaaaatctgtcagaagagacccaaactgttataataaatcggtaagttaagtcttatttagacgtactgggtctgatcgtatggcaatattcgttatttctttgttgcaaaatgtgtaaaaagagcaagatttttgcagtgtcatttacagaaaacggaataaatcagcaccaataatctgtcaaatctcccaattagcacaaattccttcagttccatgcctacagagttgccgtctgcatgcctgcgtggaatcatctgagccgtcgataacacggatctattgatccctctgcatcgctgtgttcccctaacccgttttcttcccctgcgaagaacacgctgaagaaaacgcgagaaactaccagaaaaatcgcgtgttcgcgcgctcctccctgcgagtctgcaaacacttcccgcatccggatgcaaccagacggggagaaaaaccgcaaaggaaatgtccgtacacgcgttctcgatcattctcgcgcgccaccgtgctcgcatctataaaaatgatgacgaacactcgtgcatgccaagtcggagtgaactcgcaagattcacgcgaagaagcttaggagaacatcaacaatgtctttggtgctctcgcggatgctgctcgacaggttcttccccggcgccggcggcgtcgtcgccggtgaagcccggccgccgatggactggagggagacgccggtggcgcacgtgttcgagatggacctccccgggctggccaaggaccaggtcgccgtcgaggtggtggacggccacatcctccgcgtccgcgccggcggcgaacacgaggacgccaataacgcagccaaggcggggaaggccagcggcgaggaggaggaggaaaacgacggcgtgaggtggcattgcagggagagggcggcggggaggcggcgcgcggccgtgacgcagttccggctgccggaggacgcggcggcggacgaggcgagcgcgcggatggcggacggggtgctcacggtgaccgtgccgaagcggaagggcaagaagcggcacgccggcaacggcaaggcggccggcgacgacaagccagtgtgctgccgcttctggccgtgacaccgccgaggccgcggcgcgcgccggctcgtgtgcccgcgtcgcgtcgcgttgagtcacccgcacgacacgagcctgtagtagtacatgtcaagcctacccgtcaaaaatcttgtcctttcgccattggaattgccgtgccagtatggcgcatgagtgcacttgtacaaaatataaattgggcctgtttagttccaaagtttttttctaaacttctaactttccatcgcatcaaacctttcatacacacataacttttcaatcacatcgtttcaatttcaatcaatttttcaaacttcagcgtgaactagacacagcctaggtgaaaatggcgatctctgcatttctgtgtgcttgtggcagtgaactcagcgcatatggtttggtttgcgacttgtgacagtgactagtatcccctactgcctcctctgacaacctgattaattattccagatttttcttgttaacgagatgattttgtgcgtgaaatgttagttaggtagcggctcattcaattaacgtggttcgcgttgtcgtacgggcgcgcgagagcgagacgggacggttgccgcgcgacgcgatgcgcgatccctcctcacggcggcgttggccggggtgggtggtggcgccgtcgttttccgggggaattatttgctcctcgcaacgctatccggccgcataaagtcgccgcataaccactgttcgctggtactgacctagcaggcaggcaactaggcaagccatttcatctgttcctcgtggaccattttcgtggcattatcaggttcaggtatttggccattttcgctaggaaaatactagaagagcggtaaactactactccaaccttgcaagacgtaaaaaaaaaaaatcttgtgtcgcactgtagcctcctaggcgagtagaaaaatatttaatgtaaatctgaaaactaccatataatataaaaatgaacatttgagatttgtttaagagcactcataatgccttacatctattttcatattctacaataattttcaagttttcattataataggtggaccctgtgtgttgatgcgggagtttagtatgataacactgagtaaaaataatgtgtaagatagctagatactataaacttacgtaaattgatatggtttatgataattcaaattcaaatagtatgtagaatgatgattcaaatgaaaagtaagggcatgtttggcttgcaggtacaacagctgcctgtagccagtcgtggccggccgctgcttttttttttgtgcttgcttcactgttcctacatgctgcagtgttgctgcagctgaacagaccctaagttgatgtggctttacgagagaagaaaatgagggagatagtttggatcatagattaatcatctaagggctaaaaacaattgaggtgatatgatttaatgagagagagagagcacattttaactaagttaggagttaggatgaactatataagtatatgatattataaaaatgatcaagagacattgaaatattatgcgaattatgtgagatgatgatttaacaagcttgcatttgaaaagctataaaatttaataaattataaataatataatatgcttgcatgatgtttaaatataataattgttaatggatgatgatgtggtatcttttcatgttatgctttaggatttagtggactttatagtaagagaggataggttgtttccgctgcataattttccgagttatgttgggattaagatcctctaacttacttctctctaactgatgtcattgatatgtgggccctctatatagtaggctcatatgtcagtgactcaaagttagagagaagtaagtcaagaggatcctcttccgttatgttgtacagagctcagaggtgggaaggcataagcttttttttaaaaaaaaaacgagaacggcaagagcattgccgattatattccgattatattagagggaaaaaaggcataagcttttttgagagtgctgtaaaattaattataattgagcatgctggggaaaattaattgtgggtctaggatgttggagagtttgcttgtgcacgttggatcataacaaacatttggaaacgcataatgagtagttccacccgaattgttctgtcaaccaattctttccgtttaagtcaatccctcctatattttgtaggaaaagcgatgggacttgagctgccccctctgttcaatgatcagtgcacaactgcgcagcaactgggatctcaataatggtacaagatgaaaattgacagtaaacttattcaagtcaggttgtcctctgtttgatttgtgtgcagaaccgaagttctgagccacgttaccaagaaaaatgatatggtggacaaacttgataaagtgatacgcatgctaatgtagaggactacatccgacatgggttgaccatgatctcgcaaacaaacaacgaacaaggaatggaacaatggtattggtagttgatagtctataaagaaaataatctagtccaacttgctagatacaaccttctactgttctacatactagcacgagacaaaccactgcatgcaccaaccaccaaacactgatccatttcaaccatcatgtccttgccaaccctggataagttctctgaaaattcgtttactaacttcaatttcttaatttgctaagagtagtagtactacctaagaaacaaggtgcaaaaaatacgacaaaaacaaagacatgaaaaggtagccggatagtaaatgctaatgaacaactactagatgatcaaagatattcagagaatcagagtgatgaccgtaaaaagaggtgccaacttctgaagagcatcaagctaagcttccataaactcttttacatggtactgatactgatcagtgatcactaatcactacgcacaccaaaggaagtaaaataaaaaaaaaaagaagaagaagaacagatcatcagaagcagagacctattactatgtcgcaggaaagcagaggaaggcggctggctaagctttggctccaaaagttcagagatttgctgcaagcctgcgagagagcgggtgtacgtgtcgatctccggctagtagccgccgccgccgccggcgttggccgcgagcttgatggacgacggcagcgggctgcgcagcggcgagcgcggcggcggcggctgctccaggcgccgcccctcggcgtcgtagtagatcacgccggagaagtccagcggctggcaccgctcccccatcagtatctccttcctccacaccccgtcctccgcgcggaagctcagctccgccccggccttcctcctcctcctcgacgacgagatagccttcttcccgccgcctccgccgcccaggaacggcacgatggcgcgcgacgagaacgacgccgcgatcccctcccgcggccgcaggtgcagccgccgcgccgcccgcgacagccgcctcgcgcacgtccccatcagcgccgccaccgcctgcgcgatgctcatccccatcgccgccgccgccgcctcctcctcctctcctcctcgcgctcttgcttcctcttcgagaccttgatggctagcttagcttctcttctcttctctcgcgcgcttctgcgtctccttctgcgctagctcgccattcccgcgggtatttgtagctggcgagctggtcggacaagtcaaacaaagccggttgggacggtgtaattaattaataataataatcacttaatcaccctgttcatgcttgactgatgcggttagatgacctgcttagctagctcgattggattaatttaatctttttattcgctaatggatggctgtggccatacctaggtggtgagtaaccttgtgtccctgaactacacgtacttgcgagcttgtttaatgaagtgaaaatgatggatttgtgcaattgtgtgcttgtggctgatgaatttacatgtcaaatttggccgttttgactggtgcgtgttggtggcagttgaattaaattaaaacctaagccgcgcgtaaccttgttgattgagatttgagcttggagacggttggggattaagagagataattaaggatccatggtagcctgctaggggttgtgttggcttggctctgtactgcaaagtgcagacaatgaaggggtattaaaggagatggctaatcagaatcttccaaatatcatcgtggtactatatagacctatagagagcatacacttgggaagaaggtaatgtgtcagtatttggtactagtacatgattacgaataagtgtatccataatcccactttgcctgttcataattaaaatccataatcgagtattccctccgtccaaaaataacccattcctaacatccaagataaaaatagtgaagcgtgagaataaccaaaatgctattaatcattgaaaaaagtagtaagagtgataggtagttaaaagctattgaaagagataaagtttctcgttttacatgccgtgggtagattggatggtataagttagttttttgtgagataaaatttaaaatctagaaattgagttttttttagacggaggagtaatcctatatatctgtaaaatttatccccactaaatatagttaatgataattctctcttctctcatgaagccacatcaccttaattgtttttagcctttggatgattcatcgagggtgtataatgtatctcttcacatcacctcaattgtttttagtctttggatgatttagcaggagtgtaaattacacatcttcatcctaaaggcacaccatacaacctaatcatttataacctttgtataattgataaagttacaaaaatatataaacatgcacataaaaaaatagtatagtaggtaagaaagaaaattttagaactcatatatactatattatcacacaattcttccacaagaacgcgcggggtacccatctagttatatatacaactctgaccgaagtgaaggagtcggtcaagttgatcgaaatcatcggctcgatcaaatgctcaataaacaagtgctaccagtcaattggagcgaaattaaaaataaatcagtgtgcacacacctgctgctacatctacaagcataatcatatcggctaaacagaattgaaagaatcaatcatgacacgctcatcatgattcgtgcataagctaatccagacagttgtacgtgcaccgataatcctccctcatgtcgatcgacagatctactcctacctaccaacaacgtcagatcgattagctccccgagtgcgcctgtgcactggccgtcgtacgacgagtattcgaccatccgagctagtagccgccgctgctgctgctgcgactgtgtgcgacgtacgggtgttggatgcgcgtggttggggcggccggaaaagcgcgatcgatcgagagatcatccagtggcgttgcgaattgcgatgcacgccgctagctgcatgcgtcgtgcgagtgcgccacatcgcggcgggccgcgggggcgggggcgcacgagaaaatgctcgtcgtttgctgtccatttcgaagccccggccggtaaagttggccaacatggtcagcacatgttggcgtttccgtggtggagggttgatctagcccactaacgctagctagcaagcttatcgcgttcagaattcgggtcgtggcaaaagtttcccttccactgctccatggtcatttgaagataaataaaaatctttggggttgttttttttgccggaatgaccgaaggaggtcattcaatgtaattaagataggaagaaaatattacaagaaaagttttacatcgacagctgactgtcgaggaaggatgtgcaccagagcacacgccccgaaccaagtgccaaccgcccaaacacacactatagacaggaaagccaagcaccgaaccggccatcgctatgcgagaccgattgccacctggccaacaacaccactacgatacgaagactcaaaaacgacgccctcacgaaggtcgcgatgccgaagacgccgtcgtcatccgtccaaagaactggactaggttttcgtccagagctccttgccgagggaggagggatacctcaacaatgcccccaggagggttaccacgcccgaagacatagtcattgttggcacaaagacttgggctaagctttcgctcgggatccctaccgccgtggtccgtcgcccaatctgaatccaccatctaaacatcggcggcacatggcttccaccacacccgaccggcgcccctccgtcggtcagctttcagtcctgccaatgacaagactgccaccacaccgcaccgacgccccgccgtcggccgacttcctcgaaccaccatccctgagagctggtccaggacccctccgttccaccacccgccggcctcctcgccagatctggccgaaggagaacccgggactaggtagcattgcttcggcagcctgagcttccccactgacaagcggccgcctcaatccagcctaaaaactcctcgcaaagagggggatgagctctagaaagggtgagggtgccgatcggcaacgaggaagatgacccaccgccgccagttccctttgcaccatctaggcctgcgccgacaccggaaatgcagccgcacgccgccgccactccaggctggccgcacgccttcctcggacgagcctcacgcgcgtgccagcctctgttgcggcctccactgcggcctcctcgcgccggcctgcgctgcctccgccaccgcgtcctccgctgcctccgccaccgtggcctccgcctccggccgccaccacgtcctccgctacctccgccaccgcggcctccgctgccgaccgtcaccgcgtcctccaccgccgtcggtcgcgtctccgcgcacgccggcctctcaccggctgccgctagccgccgcctccacctcccgtcgtcgcgcacgccggcctcctccactagctgccgccagccgccagccaccgccagacgccgctgcctccacctcccgtcgttaccgcctgagagcggcttgctccggccagctccggcgtggaggcgccggatccacccgtggggaggccggatccggccgcggcggcgccggattcgccgcctccacaccacgtctgtgacgcctccgcaccgcgcgttggcccgcctgtgatgcgtcgagacggggcaccgtcaaggtttggcctcgccgccgccatctcggctggccgctcggttatccggcggcgggctccggcagcggcgaggggagggagagggggagaaagtggcggcggcggcgctaggttttcccctgtgtcacccgcgcgtgggcgacgcggaggctaagctaccggaattcttttcagtcaagttttatttggctgagtaactaatctttggggatgtatcgcatgaagctgggattatacctgaactatcctattatagagcctcgtccgttacccataagtttattataagccataacaacttattagcaattaaaaaaactgatttcctattatagagccattttataagccataacaacttattagccatcagaaaaatgatttgcgaaaatttttatatatgtgtctttaacaacttaaaagctaatattaaaaacaaactaagttgaacatatcttaaaatcaattcaaaatttaaattttgactttagttttagtttttttagggtaaccgatggggcaataattggcatcgtttttaattacaggcgcaaatataagttgaatccacaacaatcagctgccacattttacatacgtcccacacgtctcgcggccctcggatcggctgatatgcacgcacaagtgactgaacatgtggatcagtggatgcagcgacaggcaggacatagagcggccactactactagctagtggccattattgacgtgctctgctcttacctcatcacattctcataccccagtacgattcctacgaacacttttgccttgggtaagtggtgagttgagtgatctacagattgacagcaccgtgtccctcaatcaatttgctttcgccggcgccaccacttgcaaccgcggcgtggcgtctctcttcttgtctgcattctcgcacttgcacagttgcaccctctgggaaaggaagcacgagggtgaaaagatctcctcgcttcgctcactcactccatgctcatcggtttgtgcatggatcatatcttctgatctgtaattgcgtggacacttcgagcagtagtggttgcagactgggagggaatgtgctcgcaagttgcagttgctgatgatgtgggaatgttcagaaagtgcagagacactttcgaagttttgataggcacaagacaacgatcgatcacagtattattcttagaatctctagttgtgtacttccattcaatgtttcagttgttctctttgggtagtttgctcttgcacgtagcaaccagaaattggttaaccctgagctgagtggggtactggtgttcgccttggtacagaacgtaaccatcttgcattaacgaattagggataggtagggtgatcaatcagcatccaggacttatttagcaacactgttttcagaattaaggtgtgagtacttcttctctgctctggtatatgatcaagcgtatgatgggccaaatttaataggtgtcgtaccggccgtcgtacatgaacatatatttgaaaaagaggttgttcaattcactgaaactctgaaagacagacgaatcttctaagcaagcatatcgattgattgttcgagaggaatcaaatgagcgtgcactcagagactttggtgtatactttctcagactaaatttgatttagtctttcgctagctgcagttgagcaattccagtttgttgtcgttatcagtgcaagtcatctgtgcgtgcaagtagcgaacgaattttggtgcaagtgcaaccttgtatgggagtaattttttcctttaattttgacccagttctttctttattagaggattaataagctaagagaggatggccctgtccccttgacagggatgcttactggccgttcggttgccatgtaaaggaatagagcgagctatggtcatataatctacatttctttaagcagtttgatcataagaatattgaatttttttccagaaataaacaagagtcttatgcatcattgtattaagaaaagtaaagttgatacaaaacgaaccgtacaaaaacaaaaccagaaggaagaacatgaagaagaaaaggggaagaaaaaagaaacagcacagttggtctattcctgtgactgaaaataggcggcctaaactctggcactatatatgctgagctgaggccgtcctagccacagccgccaccgcgctgcctcctccgccattgcctttgccaccttgggctagctccactctatctgattgaacacgtgattgttgtgctcattccatatcattcaagctccgagtgtaacgaccgtgtcaaaatctctcctctgtccttttaggatctttctctggctattgcaaagccggaggtggaaggagtgcccgttgattgacatacaataacactgtcgaattgcaccgaggactgtacacaaaagttttcaggattccagggagacatctaggatgtggtagatagtctcctcatgttgatcataaagaatgccatgatccgagcgtggtagcccaatgttgcttagccggtcaaccatctagcagcgtcatagtgccaccaaccataggaagtagcgacaatgtgggggtgcgaggggttctccaaatcgataaggaggaaggacacaccctagaaaaaggccttggtaagccgatcacaaggagtagagacatgaactctcctatttccagacgaaggagtctagctggcggagaggctaccgaatgacctgatccacaaccaatgctacaagtattccaagatcgcttgcacaccgagggcatcacagatgtctctaatccatctgttaccttgtattgcttgagccaccatcctacggcattgggtgtgtgtgggaatacgatcgtggatggtcagtggtaaggaatggatctcaacgtcgtacatccagccttttcctcccacaatagagccaactcatcattacccatgcccatgcaacaggacgtgaaagccagtgcgaaatcgtgcttcttgttcgaacaaggtatcatgagtccctgccatggtttcttcggtgaggttcagtgcaactagccaaccagatttagcatgatgtgagagcaataagattgaggatgacgagatcgccaaaatttgtttggtcatagactcagcagtagccgccctgtgcatttgatctacctgcccagtggaacctataatggatcttgttgattcccttgattacccattttaggggttccacgccgaccaaatggtaaatagatatggaactcaaaactgccttcatcgtgatgatctagcttataagagctatttgcttcgctttcagcaatcggcacaccacataatcaatgagaggttgtaaatcttgcttccttaaccttcgagaattgagcatagatcaggtggtgtggtgtgaaggtgttcacccagtctaagtaggttcaaatcctgaacccagggcacagcgggcagctagggcttgagccctaggtttgcctctaaaattttgttaaatcactatataaattttatagaaaacaaacactctattagttgatccatatcctaaccttagtcttcaaaaattctgactctaccatgctgaatccaatgtgtttcttatgaggtttcttgtgcccccttcttctttacaaaattaaagtagctagttcatcctagttattcccttgagaggcatatcgaatatggattctgtagattagaaacttaggcaaaggtcctcttgctgcttggaaatctttcgtaggaacatagagatcctccaaacgagcagctgcaggcgtgcaggcctcttgcagaatcggaatatggttcacatacaacgccttttgcaatagtgcgtaatgatccaacagctagtactaattactcaatttgtgcttggccattgatttgtaatgataatctaggagtatatgcgactgtggccggtagtgtgcggtgataggcatcgaagaataagaaacgacgtaacagagaaaaatgagcgtctaataatgtggccccttgacacctttcggccagagagttatttatgtgcttaatcgcattctgaaccactagtccggggctctacttgcagcgattaagttgacttgggactgttcgatgtgacgcggcacggcggtgatgagcgggccagcgttgactcaacacctacaaagataagagagatcgatacactgtcgaatggagaagaacagtcagcgcgacaagggtagccactcactcagtttcatactcagatgatacactgtcgaaggagcacatctcgttgccccggcgtatgggcatatggccgtgtgtccgtgtgtctgtgtgcaatgcccacctcacgtctctcgggccgaagctcacggaggaaggagagaacggcaaaacagggccggtggaacgaggccggaaagaagggacgcgcgcgatttcatgcgtatctccgtgattttcccgtcccgcgcgcgacgactcccgagtcacatggcgtcacggcctcgcgaccgtgtttgcttttgtggccaccgcgcgcgtacggcgctcggcacggacgcggacgcggcaaccgagccgcagaaaccacacggagaggtacgtacgcgaggccgcgaggtcgcagcgttgcaccggcgttggccggatcgcacggagaggctctgcactgtgaggaagaatgtgccttcgccgatcgctctcattctggaaaaggaacagcgatgtacacaactttctagagtctgctagggcatccgaagactggagtcaccaaattgttgcgcgcactggtaaatttttaaggtatcggtgaaagaaaagggtttgcggttaaagtgagagatgctcattcgacgacccacaaagagtaatttaaaagaggagatttaattagtatgcatgttagtaatactttgtcaatgcgttcccacgtacacacacacacaaaaaaaacctagctaacatgcatgttaatgtcattaactcttcatccgtgtcatgtagccaacgatttttgactaatatcctagcaactttgtgaattaaaaactgaaaagtggaagggcaataagagccgaaaggcccgaaaagcaagagaaatgttcatctcagcatatcaggcgatggaacagaactaattcccagtccttatctacaaacacctacaggtcaagcagaaccggattcctgcacgaattagagccaacaaaccgaccaatgaacggtcccgatgcaatgcaacgaaatgggcgcgcgcgtgcgtacgtgttcgtacggattttgattattcctcgcgccggcgccggcggcggcggcggcggcggcgaggctccaccgatcatcgatggcggatggctcacatgatcgcgcaggcgttggggttctcctcgctgaagatggtggtgagcctgttggcgtcggtggccatgcggtagatcccctcgcgcaccggcgtcgggtagctgtagcggtactcgccggagaagtactcgtgccgcctcggcgtcgccgcctcccacctcggcagcggcgacggcgtgtaccggaagtaccccggcggcgccgacgtggcgtggcgtgccggcgcgtgctcggcgccggcgttcggggcctgctgcgtcgtctgttcttgctgctgcggtggctgctgctgttgctgctgctgctgctgctgctccggtggcggcggctcggggccgaaccggacgcggccagacttcttgttcttgccacgcttcggcggcttcggctcggccggtggcgcgtcctgcgccggcggaggcggctcttgctggggttggggctgcgcctggtggtgctcgtgctcgggcccgtgttgctgctgctgtgccggcggcggcggcgtctgtggctggggctcgggggattgctggtgcggcggctctgcaggcgggatcacgtagacggagttggcggcgctgaaggtgaccgtgcgcgccaccggccgcatgtagtacgtctccgtgggtgggccgggcgggtaggccatggcgtagtccagcctctcctcccgccaccccctctcgcgccctgcatgtcgccacgcttcacaactcttagcaaaaaaatgaacttcgcgattttgagattggtttggacatttggtacatgaacattgactaacattatttatcaaattattaatccattgtcctaagaaacatcacacatcatattatcatttacatgtggctatgtgaggacgatatacatgcttttgaacgggttttacatgtgagattattagctgaaaatctatcgtacttatagtagcgaaaacttaattaagcagcctgcatgcatggctgcagattagcagaagtacctagttcgatcgatcatgtcctagcacgtgatcgatgcagaccacgacgtggcaaggaaaacaacatgtgcagtgtagaagacgacttaccgttgcattttccgagagctttcgacacgaacttgcccagatgatagcaacccatgcctggctcggccttagttttcctcttatctttctccctagctatctcgctgggatgtagcgatgtatgatgcgttggtgcgcgtgtgctcgagtgagcctgtgcgtggaatacatgctagcttaggaggtcgctcaagttcacggtggcaacgagagagaatggaaggaacggggccaatttaaaaggagaatactacgatcggttggtagcaagagggaatccggcaacaatgaactcctacctaaaacgcctcttttctcctcaggggaaggcatcgactgaagtggcaggacgcacataaagggtggtcctcgttttcgtggacgttggttcgagctaacaagtggtggcagaatatattctgctcggccgggacaatgcgtttgtgggagaggagacgcctaactagggatgaaaatgaggtggtgcatgctgcgtggtttacatttgtcatacatggcacaaaagggtttgacagatttgaccataaggttgcatagataaaattaagttgctgtcttactctctactcctacttgcgtgtcgattccttatttttgtaccggtgaaacgtgctagcctcattttcctgaaggcaatctgtttgcatgtaaagtagaaagctcggagtaggaaggtgacctttttttattcagggaacgcgaagccaaaattgagtaataggctggcgggttgtgactggtgcagacggcagaatggggcgggcaatggcaaggttgaaatctgttgctaggtaactcaaaatgattaactcggtttcaaacaaaaaaatgattaacaatgttgttacgcagaaaaatggttatatggtcgctaaagagctaaagatttattattactgcaaaaattgtagcaatagaatagattatacaaaaagcagatgctgcggtctaattatccacaggcaatgaatccatatatttttctatgaataactatatccttcaacttcaagcatcctatcctaatgccaaccattccatcctgcattacgcaggattctagcttaccaacatgggcagttgggcacgcattccccatttccgcacctccatgcttaggctccctaaggaacaccctctgagagcatgaagagttcaaacacaaacatagttgatcacgctacagttgattgcaacgcttttattattcccctcttccatgtggaagtctctggttcaaacctgagctcccaggtcggccagtagtgaaggtcctgtttcaaagtaagcacacgaggtttgccattcaaatggacggtccgcaccctaacaaattcaccattttccaatccctgaaataaaaggttatcagtattaattcaaatcaattgaacataagcttgccaggtcgatatatcacatgaaaagacttgactataccaaaggaagataactattgataatacgtaccttcaccacttgtataaaagtttcaagatctggagttggcttcccattaacttccactatccactgcagagcatagagaccatatctatgtacgggacttccatgacaccatctgcataaaatatttgatactcattcctcgttcccattaggtatctaaaatgtgcttaacaccaatgctatggacctaccgccaagccatgtacacatcttaaattttcaaccaactctagatttaccatcaaggagggagaattctaaatgattacatatatatgtatataagatttggagcgctacactactattatgacattgggagtggaattagaggaaacactatcaatatggcttttatgaagctgatttgctgtcggtgcccaagataacacaaatgggtttcattattggataggatgtactaggaagagattgtaaagttggaaagaacaaaaaaaacatgtgcaattgaaagggtagagctgaacttgttgagacccttgaccccaattcctgttctcttccctttatcaggatagggttactcggtttacactctaccctgactaagtgtactcaccagggttgttagattcaaatttaaaattttatctaatatcgggcacagctagtgaccataccaacttgagatacatgggaattgtagaacagacaaaaacaaaagacatatcacaaatgctcgcacttctcaagtgttggcatccctgaacccacagtagctataggcttatagttccaatcaaagaacccatagaagcaacatataaattcgggtggagcatgttctcacctagcaacataaactccatgaccttcttcgggcaaaaaaccaagtgcgcgcactgctgaatgaggatcctggattatgcatccacaccaattcaccatccgtgttgttccattgccatctcttacatcggttccaacaataagatcaatttcttttccctgttaaatgttgacacggttgaacacatagatatttagattcatacagtttcgtcaaaaaaaaatggttggtttcttacaaccagtcctcacctgacggaatattgtcatgttaaggactccatctgaatcaacagattggtccaatttctggcaagcattctcgatatctaggaagcatgtaattggctccttattgatagcaaggatcatgtctccctgttcaaggagattttctgctttggatccagccaaacaacctttgacccgcaaaacttgtcttcgcacagggtccttcttagctagagcctgcaaggataatcatattgaacagtaaatatttcatgcatccaaaacctctccacttgctcataacactagcatattagacaagtccaaaaccaatcaagcgaggtcctttactcctcttccttacaaactgcagcatttatctgtcagcgaacacttcaagtgaatggcatgaatatttctccagaacaataaatattgcactcgcgtaattacatagaacattcaggttgacagtccatcaggaaacgaatcatagctgtccgaccaagcagagcaacttcagaaaagactaaaggcaaggccaacgtgaaattacctgcacccagctatcactcaatccataacttcttgcctttgaaagcaaagttggatagagttccacctccagaagtctgatgaatggtattggcctcctaactccattgataatacgaaatggtccaggagtaccagagattaccttctcaaggacttgacttattgcatatattggtatacctctaacaaattgatgatcctccgaactgctacaaccatatttcagctggagaaaataattaattgatttacaaccccgataagcacatggaagaatggctaaactgctaagaatggtgccattataccattgcttacaagcattaaatgtgtagggtatgaattaatgctaggacaaagaatctatcaactttagtcaaacatgcagaaaagtctagggcctttaagtgtagtgaatatagtttcttatattgtccatttagttgattgttcaagatatcaaacggctaaccttccgtgtaagacggcgttttgttctttctttttttcttttgaataaatgttcctgagaacgtgcaagcatcattacttaggaaacaggctaaagcaaagcaactgtaatgtaaactaacctgggtggaaaagcttgcccataatgcttgaactcttccttgctcatccgtcaatatacccgaaaatgcactaccaaaatctaaaataaatatttttcaatatagttattctgaaaaaaaaaacaagacatgaaatcacaagttgaaatgtacttagaaggtaccagtatcgagctcaatgacctccatattaattgcacgataccgtggacagtcagctgacccaatattaacagcagtgcagggattagttatgattgatttccttgatgtagcctgcaagcttctacttagcccaactaggtagacagaatctcctcggcgcaaggcaggttctacataaatccaaaattatagcttaaaattggaagtggattggtaggtcagaaaggttatttttagtgtggacataactaaattcagagattagggaattaacacatgaaagagaacaaaccaggaagaagcttagcagcccggacaactgatgctccagctcctagtgcagaagggtcataagcaaccaatgcaaaattgtgaacgggatgcagaaaaacgacctaaaaaataaaagtgcataagctaataataagttcaaattttgtgcgttaatatttataatgaacaggaggggagcaagctcatacttctgcaggtatttcaatgggatatgcagcaaaagaaagcattatatcagagatagatacagcaactgtattcctatcaacagcaaccagacccagacagtccgaatgatatattattacaccagttccgaagaagtgttgcgaatgcactccatcaagcatgcacactggtggtacatgcacctataaaaggtaggcatcagtaaggcagttttgaacaagaaacactacaagctcaaaactaacaagcacaaggtaagcattgtaggtacatacaggttaaaccaacagcagtagtacaacattcaccactctaaagttaaaaggtggggaatattgctaagcacgtaatggaacagtaagaactaaactttatagaaaaatgactcaacaagcagcggtgaggatatacaagaaaatatttgtccaggtagttagtattcagaaaaaggcctacaatgccaaatactaggctttatacaactttccagcacccaagtagtttgtccaataacctatagacctgaaatgttaaccaatgataacacaatattgaaacagatggcaggaagtctgccgttcacttcagatgaaaagatatggaaccacgaccatctggcccaataggccacatgagaacaaaatcaccatataaatcacccaacacaacaacattgctccccgcagaaccatcaggacaagtgctctaaagaatggtctacaagtacgcatgcaagggtacaaacaaggaacaggtggcccaaacttgtaaagcttaagcagcacagaaggccaagtatgccgcgtaactgctacaaggcggggtatcagcaggagactgcatactgcttatttgaagcttgggcagcatacaccaacacatcaaactgatgaccatgactacatgaaagtttcttctgaaatcaaacatagatattgctcacctcaaacattacaagggctggttcaattacttgttctgccaatgatgcattacttgatattgttcgagcaaggtcagaaccatcaacactagacagatgcctcaaaccaccaccttttatttcatctaaatcaccagaagatgatatcgttccctcagcagctatctcctcatccacccgccgcctttttttctcaacaagagaatcttcactcgagtgggatccatctacattaatctcatcatcagtttgtgttttgatgcatccatctgtcaaattctcagactcatgctggcacttgagatccataggactagattctggtaaagatgaaacagaattggagtttgcatcaataggaccagcatgatgagctgaagctataaaaggagattccggcggtatagctgattttgcagtccacaagccagttgcatcatttcgagtatataactgaggaggcgcataccattcatgccgatcaatggtcaccagtacagactggatacataaacaagataaatgatcagttgtaatttttgaagtgagttaatgtttactaggacgcacagaaatatgactaattatcatgattaaaagtttccaaggaagatgttcctaccttattcctataacggtcggtgtactttacatattcaagaggaactcttgctcctctagatagttttgaaatacatgcaataaggtcccctaaattttcaatatcctctcctgcgagctttttaataatagcatggcgtggaacagatgcccgagagagcatgtacctgcatattatgatggtggttaagttgcagaaaaggtaagataaacaacatcacattttagacagaatatcagctaacaaatagaagaaaattaatgcaggcaagacaccaacaggaaacttgaaaagccaataaaaagacagatataatcccaacgtgaaatattgcaaagagatgaataacatataaacataaattgcagctaaaactcactaaggggtgttgtgctctgaaagtaatagctgtgaaaaatgaaacttagttgggagttcaaacccgactcaattatcataatctattggaaagggatttatcatatgaccaatgcctggtaaaatagaccagctagaaatcacaactatgctttgatgccctttcaggaaatgaatatcagttgttatcatcagatgtcttaccctgcctcagcaacatatacgagaccgcatttgaacctaaaattccttgcctacatataaaaaaagattagtaacgtttcaatactcaataaatattgtaaacatataattttatgatgttaaatgactttctagaaagagggaacatatgatgaagtatacaattaaatgagttgcaactattttcatgcaagaccagagtagggaggctaacatttctagcaaaaagttcaacatgatccaatatttctagcaaactttgcagattttgaccaagaaataatcaaattacaagtaaatttaccaaagattcatacttcaacgtgctttcgcacaatattggttttaactatcaaatatacatgttatagcagattaatggtcaaagtttaatcttgacgactttctaaattaaaaaatatacactatccgattcataaacttataaacatgttaatccaattatttgctagagaaggggcagagagggcaacagctcagaaaagaccattaaactgtggcaaacatacctgctggtacgaaagtggatggatcacagcaccactaacttccaagaaatgatttggagttatagagtgcaaatcctcaacctgaagaatcaaattagtatgatgtaggtcgcttattaatagtaatagaaaaaatagtcactagcgctgcatcatgtggtaggagttaggactactcgactgacgcaaatataccattctctaatgaggcaattaaataagatatgccagtgctgcaaattacctccaactttactgttaaaggtgtaccacctctttcgatctgcaaatctatctccttgccaacactgtcatcaagcaaggtctccattgcgagaaactgtgttacaacctgcaattagcatagtataaatgtcaaatctatgatatgaaaattaaaaatgacatagaaaaaacattagtgaacaaaacataagaaactgtttatattttaaggtttctgcgtgttcaaagtaccagaaataatttgcccatggacaaaaataaataaatattggtgggctgtggtaaatgtagcagtgaaggtgcatagcttaaatttagttggtgtcaagtgaaacaaagccttcttcataatctagttaagacgcatactcaatacaaattagccataaaagctacaatgccatggctggccaaccggaaacgaggacccaaagaactcatgcaaggggatgaggtcatgaggaccccaaggagctcatgcaaaacgtggcagcatatgcagtcatcacaagatcctaagactggctgcccaaccataaacctgtccacatgatagtaacaaattatacagcattacttacctcatcattcatgcgaacaagcacatcaccaggttccaaatgtttatgtgcaggtccttctggaacctgcaaggacagagttcagtttcataaatcatgaatggtacaatacgagtgagctaactgaaaaaataaatcaaaattaaaattcatgaatagtaataagaatcataacttaccacggaatcaacaaccagcattccagtctcgcctgatggagaaacaaggcgtaccatctgtacaaatagaaatagcaagttgcagatgttaattgcagtgcatgatgttttgacattcaatatgtacacaatggaaacacatatttaaattttcatttcttcagataaagaatcattagatgcaaaacaaatataaacacagattaacagtaattagtcacaaatagcaagtatagatcaactttaaaaaaaactctcgaacaacttaaatttatacattacaaacatattgaacatgactattttctgatgctgactgatgtcattcaaattgcaaagagggtggaaattctagccaatagcaaaccagcaatgatgcacaaaaatacctgttctgtttcattcctgagtccaagacgccgagtttcttcaaatcctttgtgttgaaaggtcaccttaaaaacaagggaaaagggaaatgatctaaggactggcaggaggggggcaacaagaataggtagaaatggcaacacaaacaagagtaatagcctttgttaactctaataatctcatggacagattgtgctttttaactatcgctgtaataaaagtacagcagtcagaggagcaaaattgactatacaatggctgctgcagcactctgtacacttgtggtgctgatcattgcaaattcacaaactttatcactgacatacaaagaaagaagaacaattaagtgctaaaatgtttacttgttcaccatacatcttcagtagctccaccgtaatagaaataaacatctaatgacacagcaggtcttggtaaaaaaaatagaacaatgggatcatcagacagcatgctcacctgaagtgtaccacgaggaatgtaatcagattcaggcttgctaccaaaagcttcccaactgtcacgtatcagattaagtgccctaacaacctggaaacagtttggacaaacaatataataaacataagggtgccacgggcaatcaataaatattaaacagcaatggcattcctatttgtatgatctcggattttggtcaatgccaaagtgccaaactataagttctctctctctctccttgtgatgtctagtgcataataggatacttcataccatacttttacctgatgaaaatcattaagccagctaatctagtatagatgttaaagttagcctaattgcatgtgcgctttataatgacatcattttgaactagcaggaccacttcgttgttcctgtcaataagagaccttacaattaatcaatattaaacagcaatgctattcctttttgtatgaactcggatgtcggtcaatgccaaattatatttttctttctatctctctctctctcttcttgtgatgtctagtatagatgttaacctaattgcatgtgtgcttttatgactcgtatcaatttcaactagcaggaccacttcgttggtcttattaaataagagaccttgcaattttagaacaaaagcataagcttcctgggctaaaagtagtatatctatactcctttaaaagaaggtagtggtggtggcaatgaatctgtcaccccacctactcccattgtaaattttgcaagttaatccctgaacttcttaatattaaaaaatatcaaatctaaatggatagccacattaaattagagtaagatgaatattccctatagcaaaaaagatgggtaacacattaatacgttttcttttatccgtagcaaagcacatgcatttagctagtttcaatgaacattttgtaaacaacttacacgttctaatggaaggaaaaacgcagaagcactggaagatttacttccagcattcagggcgacagctcttccttgacaatcaacaacaggggaaccactagagccacctttggtaccagatgcagcctatagaaacatatgattacattaaaatgacagagagagtaaaaggaaaattagtgaacctctattggataaaagcaattgaactataagacaaaatcacggataatgggcatgcttggtttgctaccatttctaaccttaccaaattttagcaaggcaacaaaccaaccatacctacctttccataccaatatttggtagctaataaacttcctgacctaacatcacacccaaatagatgaggtttcaaactaaacgtaccaccacatacctaccttacccaaaaaaataaataaataaggtgtggcattaacaaaatttgataaggctggtttcggcatcaaactaaaacatgcccgatatttcagaagatgcatgaacatcaccaatttgaattaaacatatactattctcaaatagatttcattctagaatgcatacagtcagacttagaaattttggccattattatatacataaaaatattcaaatatgtcatgcaaaaaattataagagtatatttgtcacgagaactactttaatgtcattatttttaaaatgggtatcattatattttaatatcgatattgtatgagcacatcattcagataagtaatggttaaaaggtgtgtattaatgtcccaactgacaagtcagaagagaacgagagtatggatgtaatattgagtagcccgagaaaagtacctgcatgtagaatgtgttgaaatcgttgtacccatccctgtcaaaaaaaaaaggttaaacgtaagattatatgcagcaaggctgcacataaaaattattaatcatatagtattatctagtagaagctggtggtggcaagctgctccatttgggtgggtagagaatatagagtgaatacgaactacaaagtcttttttgcccaagttcggtggattgaaaaggcttggagaaaaatgaagcgaaaggttgagatttaatccgctttctccatatgtatcttcacttactgaaactaaataaagttcgcatagcaagtaaactatgatctctgatcctctatgatatgtatctccctatattttattactattttctaagttcagtagccaacaaatgaattttgtactatatatttgatccctatgtccaacaatagatccaggggtaatcatgagaaaagaaaatagcactaatgtaatgggccgttatggtaactagaaaggagacatacttcttgtagtaaggtgcttctctatcaagtcgagcaagtgttcccgccaaaattgacacctgcattcggtgaatgaaaatcagaaaccgttgcagtatgaaacacaatctatcggataatttttgaagttattatgctgatgtgtacccatggaatgtaaaggattaagtgattaacctccacatctaggtccagaaaatgtatatacatattaatgcatcactatctagtgttagtacaaatcattgtcccgtcaaagcatgtcacataggacacaacagaatctgaattaccacacttaaataggaagtaaaataatttgttccagtgcctctttccagcctaatatgtgaaatgttttgatctataccattgattggcacatatctacagtttctgagccaactagttgaagagatgtctcctgaatcaacaaatattgattaaaggcccgtaataggatgttgtatgcattgtctttttccctatatgctaaaatcttataagcactacagaccacacaatattacaggaaagaggagacagttcacttgctgaaatgccaaactgtaccatttgattatatagttttcagtgaactacatgtgtggaacatagaggtttcaatgaattgtatcattttagcctttattagatgcaagaagagacagttcgcttgctgttgctgaaatgccaaactgcatcatgtgataatagagcccacaatgaactgtacgatgtacagaacatttgctttgtgagctctacattgtgcttctcaacaatgggtgtgtttagttcgcgctaaaattgaaagtttggttgaaattggaacgatgcgacggaaaagttggaagtttatgtgtgtaggaaagttttgatgtgatggaaaagttggaagtttgaagaaaaagtttggaactaaacaaggccaatataagaaactaaagcctaaagcctaacaattaaaaatgattgtcccatagtccataagagaatttctggagatgtaaatcctagcaagtttcttgtgctacattgctcattatatgatagttcacaatatcaactaggaaagaggttaatctagtttttacgtaaccttttcgccgctgtcattgccgacaacccggatttccagaccaacagatgctgcttcaggtgctagcgggatctcatcatacttaaggaacttgatagcacctggatcatagcgaaaaaaaccaaaatcatgtacctgtttcgagaagagggggaaaaattttggattaacattatgccattagcacagggagaacaaaatagaatagaacagaaatgaaatgaaatgaaatgaaagcaaacacttacaggatctctgtacaggggatacacggggatctcctccctgttcacgaacatcgcctccgcgacgacaggccctgcgaacacagcgacagcagcatcaaaccagtagcacacgagtcaatgcacaaatcacacggaaactcccggggagggaaacgggcgggatcgggcgggcccctacctggcttgacgacgtgtcggttggtgaggatgatgcccctggacttgtcgacgacgaagccggtggcgtagctggcgccggcgacctcggtgtcgaaggcccgcggcgcggtggtgcggaggacgacgacggagggcaccacgagtgccagcgcccggcgccagtcctccgccgtgacggtggactcgatctccatcgccagctcccctcccgcctcctccttcgcggggctctccatcgatctggcccctcaaacctcctcctagggtttttgagctctctctcccctcctcctcaattcgtcgtcggaggtgaggatttttgggtagcaatctcacgcgggcgatgtgatggtggggcggtgcgggtgggtcggggtggtggtgagatcagcgagggtcgcggggatggatgggagtggagctgctggtaaatgcgcttgtggactcggcgagattttagaaggggagaccaccaaccgaggtcacgcgaaccggagggggggatattttcgtcggatctccttcggattaggcctctgatgaaaatttcaggctaatctaaacgtgttgggccaaaacggatcgtagtttctgtatgatccatgtggattatggctacgtttggtataatgggccggatgatcagtctacattctgtagggattttgggcctaattttgcctaggcctatgcgtttagcctaggggcgtttcctgccacgtcgacggcgaaggtagggtgatctttgtggcagaagagaaggaccttgtttcagatgatgccctgtgggccttgtataagcagtggtgcaaggctttcaaccaggagcgtgaccatgccgagatggttcagcgcttcgaaaccttcaagagacgtgtgcagtgtgctccttgtggacagagctaacaaggaagctatcagagatggtctgtcccgcagacttggaataatcaagttcactgaggcctctcacattgcaagctatgggtcccgtacccttagcctaaaaagttggcccaaaaacactcaccccagagtgtaagcacccatatatgtgtggcttaagccctgtttgattcagtttaggattattataatctaacttattaggagtaagcttaaacaaacaagtagattattatagcagattattataatctataagtcagattattataatctgataagctgctctagaggagcttttttcagattattgagtggctaaagacccactacctctacatacttgagaaaaattacccacctatatcattaactgaacagatagctgagggcattatagactttagcctttcagacccaataatctatgccttcaataatccagacaaacaaacaactcacaacttattctatgccagcttattataatccaacttatagtaatctggcttaataatctaaattataagaatcaaaagctgaaacaaacagggccttaattggatggagacgctatacaaggcaactactcctacagtgcgcgtgacctgggtgcggttagcatgggcgagtggaagaaataatttcctccacctacccttcccctcccactccgcccattcgatcctatccattccatcccctccggctcctctcatcgcaccgccgtacccgccgcttgtcctccccgtccggcgccagctccgcttctcttcccactccgccgcactcgccgctcgtcctcctcgtccgcggcctcggctccgtctgtggatgcggcgccggatgaggcggccgtggccgacagcacctcggcatcctccgtggcgggggggtggacgacaggttgccttggcgatgacccgggcaaggcggtgttggcggcggatctggcagacgcggcggtcgtcggcgcaaggccctggagcggcgagcgattcgaggcggcggcgaagggccgcggccaggaaggaggtggacgggctcggcgacgacccggccaaggtggcggatctggcggacgcggcggtcgtcggcgcgaggccctgcctcctccagcgccgccatgggggacgtcgccgctccacgcctccctccttctccccgagctccccttggcagcaagatgactctgatgcggtggtcggcggcggatctggcggatttttttttctttttcatcatgtggtgtacatacgtctcgatttgttttgttgaatccgtcttctttgagttcttctcttccaatcccgaattttttcgtgcattttcttgacttggtggccggaggaagagtggctgtggcgggagcgctagtgttgtggcggaagctgcggcgggagtggattttgggagggcgattctgggatttcacggcgctagggcacgcgcgtgtgaggcgacgctgcccacagcgcgcgtgcctggggatttcggtgttgcgcgctcctcgcgccgtccatgttccgcgcggctttgcttggaggcgaggggcttagctagggcgtgcatccatctgccatgcacgcgaaaagccttgctggcaccgtgtagcaccggtccagctcaccgcactgtgagaggcctgatggaaagatttcagagctacaggcctggaaagtagtgcctatggccaagctttttgagggcgtaccttactcacggggttcggtgattgtggggagtgctgataaagtcctctttaagtccccatgaatcatcagccgcccaggatatttatgtactaagctatggtgttatacttttaatgtttaaggtagtgcctgggaaccaaagcattagcgagttatagcaggccgtgcatacgaacaagctaatgccctgttatgcaaataaatgcttgctcctgcaggtctagttatgttctatctaatctatgcttgtgtaaggtacccttaatctaccatataatgaagggttaattagatacataccattaaaaatttatcagttttgaaatataccatcagtattcgtgtatttggaactatgccattacaattttacacatattcaagatatgccactacctaccgtttacgaaaaaatttggaccaaattacccttttttgcttctttttctcccctctcctttcttccacagctcagagaacaggcggcggcggagcgagcggcagcagcggcagcgtcggagcgagcggcgagcggcagcggcggcagcaacggcagcagcggcagcggcggtagcagcgagcggcgagcagcagcgatggagcgagcggcagtggcggagcgggcggcagcagcggagcggcggcggcagcggcggagcggcggcggcagcgtgcggagcggcggcgagtaacaacggcagcagcggcagcggcggtggagcgacggcatcggtgagcggcagcggcggtgcggcggcagcagcacgcggagcggcagcgagcagcagcacgagcggcgagcagcagcggcgtcgagcagcaacggcgcggcagcggcagcagcagcggcggtgacggcgccggagttgaagcagcggggagagagagcttgaagatgagagaagagggagagaggtagaagatgagggcatttttgtccaatacatgcaaaatacgtgtcttagtggcactactgaaattacaaacaaatatcaatggcatcgttccaaatacgcaaatagtaatggtatatttcaaaaccggtgaatttttaatggcatgtatctaattaaccctataatgaaagggtcatcgtagcccgaccgacaaaaaaaaaaaatctctgaagctcattcttttgcttattaggcagattttgaattttcaatcttaaatttgaaactgattttgagattttctttatcggatttttttcagcctttgcttttagatcgctatgaacacgtataaaaaagttttattcacaaattactttccatttgtaaatatgctatttcgcttattccacgaaacgatggggctgaacgtttgccgcatctaggttagagcatctctaagagaatagccaaatggctctccaagctaaaatttggagagtatgaagaaaaaataccctccaacagtctctatatttggttggctaagccatatggctggccaaatcatagcagtcactggccaaatgtggagagtcatttcagctggctatccatgggtcccaccactcctaccatctttctctttgcctaaatcgcagtggatcgtcgccgcccgcctcacgcgcacgccctcctcgcgcgcacggggagccgccacagccgttgtcgccctcctcgcgcgcacggggagccgccgcagccgttgccgcccgcctcgtcgctgcccacgcgcgcgggaagccgccatcgatgggctgcagatgcaggagaaagagaaagaggaggaagaagaaggcaacggagactgacagtgggtcttttttttattttggagatgtaaatagagaggttgttggagtgaatacctagtttgactacccaaatcagttagagagttggctatatcagtatttggagagcttaatttgaagatgttgttggcgatgctcttaagcagctgttgttacttggaccagacacaaaagccattgtagagcgtgtgaccacgtggagccgcctagccatcacgcgttatcatttagcctgtcccccctgttgctctctcattagaacaagtttaatagtatagccaactactgtctttaaatcatttatagtcaatttatacaatagttacttataaatatatactacacagttaatatctagtcctacctatcatacacatatgtatcttatatcttaaagtccgtgctgtagctggctataaatttatagcacgctgcttttctctttctcttttatcttcttaaaatacacttatagctagcttttttatgaaatagtctattgatgtacctgctcttaaggtggtggaggaactttagtccctcctttctaaacaccaccttatatccgtccgatctcaggccatgctccaatcatagtggctaatggaaaagttggagacatccccaaaaatgcctacttattgcctagccaatctcggcatgcacaaggccagctagctcatcaaaggtaagtgaagccacacacatatgcactacacttgtgcaaaacgcctactccctccgtccaaaaaaaaaaagacaccctagtttccgtacccaatatttaaccgccgtcttatttaaaaaaattataaaaaaaataaaaagacaagtcacgcataaaatatttatcatgttttatcatctaacatcaataaaaatatgaattataaaaaaaatttatataaaacggatagtcaaagttgaacacggaaaaccagagtttgtctttttttaggatggagagagtacctcagctttgtcatttccagattcagcacaacagtattcaatgcagaatagtagcagcctactgtatgtttgcttgcgttccaagtgctcaccagacaagctactagaagagaagcacactgctaagggcatcagcaatgtgagccactactagaagagtgtcctcattaaccgaggagggcactcatagagtggctatagagtacaacctcacgatgtattatccccctgagcagtggctgagggcactcatagagtggctatagagaacaacctcacgatgtattatctccctgagcagtggcttcaaaatccaaagcaaccgggtgggggtactcaggccacagtgggtgtcctagtccacagtagccccaggtggcaaattcccgaaataccctggaaccctctagtcaattccgatcgagacgagcccaaccgtacctgtgggttcgttcgttgccgtttcaattcgacaccaatcacaccacacggcgtcggcgacgaccgttctctctctcgctcagtgtctcccccaaattccaattccacatcatcaaaaagcagagttcaaacacagtttacacacaaaaatgcttaactgaaccaaacatagtactacatgggagtaatagtagtacacaaggaaggaaggaccaggcctaatacttgctgatccatccaacaacttatacgatccattatctaagaaaacagcttatacaatcaaacaaaaactccttaagaccaagccaagaactagaagaaaatacagcaagcatcacaaactagtaagtaagctacaggaggttcttacttaaaaaccttaacaacctccttaacctgaaaggctaatacgacttacttaaccacgcgaaatcaagatcgagcaagaagtatggatggattagtgcttactctaatatggcaactaatccaaccaagacaggggcgagaggaagagatcaacaagagatttttaagtatgaatgtcttcatacttagaactaatccaatcctcgtggtggtgttgctcctcgccgtgcggttgcaggtgcgggtggtggtggtgcttctgctgctcgcggtggtgggtcggcgcgaccatcatgccggtctggagcgcgtcgacatgggagccgacctcgatggccttcttccggatcgaggccgcggacagcgtgccgccgtcgggctcgcggggctcgcctgcgccgccaccctctgacggcgaagccagcaaggagatctcctcggggaagttgagccgcgccgaccggccgcgaaggtagaacaccgcagggtcgtcgtcgtcggagtggcggcgaggtggccagatccggcctgggcttgccggatctggcctcgggcagcgacggcggcggctcgccggcgaggtcagcgccggtcgccctcctcccgctcccctctctccctccagccgtcgccgacgaagctcatcatcatcgtcgccgaccgccctctcttcgcccgcatcgccgccaccttcgtcctcccgctctccctcctcttcctcatccacatcgccatctcccacaccctcttctcccacatcgactccgccctcgactctgccgcccccggcacctccgcccagcgccgcctcgccgacgactggctcgccctcctcctcttcaaggccgccgagctcctccctgccgtcgcggacctccccgcccgccggtcgatggcggccggtggagcggatcgacgagtgggcgccgccgtgggagagaggcgagggggcgagggtaggaaggggatttggggggagcggtgaggagacgggagttcgcagcgggtctcctcgcaggggcgagggccggctctccgcgaaaagcgagcgctccttgcatagagccgcgtctcccaaggagtagacgcgctcctagctggggagacggctcacgccgaaaagaggacgggagggaaacggccgtttgtgaggggacgggtcgaaggtacccattgctgatggcctaatggatagtacagaagagtaatgtgcaatccagatttacacacaaaacaacaaacactgcatgtaaccccggagggagatctatcaaagaatctactgtaaaaaggcagggccataagtttacagtttacacagatctataataacagatgtgggggtaaggagaaaagagaaaggagaaaatggagcaaaaacagcagtgctcctgtagagaatggcatgtcaataaaaagaaccaaaactttacaccacttggaccaacccacttgcaagctcttccctctgcttaccagccagacacggtggcttgcaacagcagaagcgtgagcccgtctcaactctcaaccaggcatcctaaacaatatcatcaggtatatatgtagactgtagttatgtaccggcagtcttcagtagttcagttgctatgtgcctatgtatgagcagatccaattgcttccttctcaaaccgcttgatctgcccagccaaacgcttcatgttatcatcgtatacgtaagggatcccctcgaacatcaacttactaccattgaccggcaccggcacaaattcccgacaaggctctcccatgacattgatcgaattgtgatagtggtagtatctgatcaggctttctgtcttatgggttgtcctcccgtagacattctgtgacatgtgtacgccggcagagtatgcgtttcgggcctggatcgcatatttgcgatctcgcctaactttggtaattgaattgcggaagacaagcttctcaaaaccccattccctgcatatgaacggcacacgtaatatgttttagcatcaaacagtgtcaaacctaccaatctaaacagttactataattgtttccttgcaaacagacataaaagcatgatagagcataaaaattcaaccttttggtgttaaaaaaggtcttttttttcaggaaccaacagtcatgagccctttgttgtgtaaaaattgggccttttacaggcgccaacattcacaacagcacttgtacaggcaatgacttgcccaaagatcaagaatgcagatagaaagagcatctatagaaaattatatatatatatatatatatatatatatatatatatatatatatatatatatagacatcaatatgaatgtgggaaatgctagaatgacttatattgtgaaacggagggagtagttgtgaagtcaaatttgttagcaggggttacataataataatagatgatgctctgaatattccgtaaagaagtttcttgcacatagatagtttcactttcatgtaatacatggaaatctatacagtattattcagcaaagcatggtgagagtttttagacatcaattaatttcattaattgcatccctttttcctggccagacattagttgtgttcctttagtgaccttaattagtttgcagtttcctacaattatgggcctgtttagatcccctggcaaaatttttcaccatctcacatcgaatatttggacacatgtatagagtattaaatataaacgaaaaaaaataactaattacacagattgtgtgtaaattgcgagatcttttaagcctaattgctccatgattcgacaatgtggtgctacagtaaacatttgctaatgacggattaattaggcttaataaattcatctcgcagtttacaggcggaatctgtaatttgttttgttattagtctacgtttaatacttcaaatatatatgtctgtatatccgatatgacacgccaaaacttttcaccctggatctaaacacagcctatgttggcaaagatgatgaattgcgatgacttatgtccatcacctactcatcccaatgaataaagatggagtacctcaaaccaactcttaaaagaaaattggatcttttgtaccgaactaaccgaagcctatgcaaagttaacttgaaggaacataccagtcagaaatcagaatacaatacaagacatggttacacacttgaacataccagtcaatcaacgtctgcagtctggacttgcaagttgaaatactactactatattatactacagctcattgcccaactgatcaacaaattgcacaaataagtaaccgctgacttacttaacctcgtctagaatgtctgatagattaatcaacacaatgcacattccatggcagacaacaaactacccaaaagaaaaatgctaccgaacccagcagaatgcaccctgcagcctaaaactgatatactgaacggctataacaaaaaaaattgcaaaattttcacagcatttgctctaattcacgcaaaagtactcaaatatcctacattcaagcaccccctaaatctgaaaaacaaaatagcagatatggaatttcttcgatataaaatgggagtaggtatgcaagaagaggaccaaaattagaacatgcgaggaatcaaaaagacaaaccttgagtaatccttgcttggatcctgcacgcagagcttgctggacatgggattctgctcgatggtgaactgcgagtatcccgagagcttgccgagcacctggtcgagcgtctgcccattgggcaggtaaatgtactcatcgacgtcgaagaagaaggtccaattggcggcgtgcctgtaccggtgcaggcagtcgttcaccaccaagaactggttgtagtagtagccgtcgtactccgcctgcgcccggatgtcctgcaccgtgagccggccggcgcggacccacggatccagcaccgccttcacctccgggctgatgccgccggcgtcgtggaagacgaagtgcgacctcggcccgaagaagtgcgcgtggtaggccacccactcccgcatgcggctggcgctgaggttgccgtacagcgacgagccgcagtagaggtagtcgtacgggaacggcgggctgaagcgggactcgtcgtacgagcccggggcctcctcgagcgccacgaagcgctcgtagcggcgggaggtggtggagtagtaggcgtggacgagcagcttgccgccggcgttgtcggcgttggggttggatgggaaggtgcagttgacgacgacgacggtgtagacgcggccgtacccccagtccgggagcatcttgtacgccttggtgcggacggggcgcggcgacgggttgccggcggtggggttgggcagccactcgcatttgaagtaggggttgctgaacacatgggtgggcttggacgctaatcccacgatggcgaacgtccgcggcccgccgcggtacgcgcccatctgaacgaacagcgccgccgcgctgccgtacggccggagctcacgcttgttggggtcctccacccgcgccggcctcgccgccctagccaaccgcgcggggactgcgctagcaacggcggccggcgcggtcttggccgtgtcggcggtggagttctccgaccggatgacgcctgcgctcgcggcggcggcggcgggcgtggcgatgagggaacatggcgaggccgagacagaggcggtggagcgcgccgcggtgagcaacgagccgtacggctggagctgccacaatgcgacgaacaccgtgaggaaggcgagcgagagcacgaacgacttgatgtcgacgcacgggacgaacactccgccgccgccgccgcccgcgtctttcctcgccccgttcttcatagctacctacaccccgccgcgcgccccctctccgccggacgccgccccgcagcagcacgacgaaccgcgtggcgaggcagatcggcgggcagagaaggccaaggtatcacgcctcaagaggggcgcggagaatgtagaaggcgatgatgcgagaggcggaaggggacgggagcggaaggtgatgaggcaggctgctggtgtcgcgcgtgaactgaaccctcaatccagcgatcgatcgatcgatggatggatgggtcggtcggcgagacgagacgagactagacggcgtggagaggagaggagaagggacgcttctggactcctcgccgtgggggtgtgaattgtgatgggaaatggcagaaacgggatatgggggccgggccgagccgcgcggcgaggcagcggagcaacagtcaaggcaggttgccttctcctttcctggtgtgagttatggccaccggtagccgtggtggtcgctcctgccgcgtttactgcatcacgtacccgcaatgcgcgtccccaccaaccgtagtgcggccccccgcccgcctggcggtgcaatgcaaacaccaagaaaacggccggggaatgggaacgcgaaaagattaggatgccagccaggttcgttcagcccgtcgtaccggcggccggtgatcgcgtcgtcgccgatctcgtaggcagaggccgtgttgcaaagttgcccaagatttgttgtgttgtttaggatagatatgatggtatgggggcagtgcatcggtgacgcatccgagacaccactgggcaatgcatgcactgcatgccatgcagctccaaaggccgtgctccgctgcatcaacgtgtcagcgcagagcttcaccagcagctcgttgatcgtcacagcactgcacttttgttctgttctgatccaggataaataatacggcgtgctccaacaaagcggccgagcagttctagaattcgacgtgtcagcgaaattgcggttctcgtattcctttctctttctctctatccgtctgaagaagatcgtcatctcgtcggtctaattttcccggccttcctcgctggctctccggccgcgctcccctctgcttgcagccttacacctgtatcgtgcacgccaacagttcatcgtccccatcaaggtcacacctttccaacagagggcccctcaatactttcgactttctcctttatgattttcggaagtattagtaccccacatttctaacgatgcatatgctaatccaatgtatattcttaattctgcactatagaactctacaagtctattatagatgcttgctttccgtgtggttgtgcccaaccgcatcagcactaacggtgattaaacttccaggtaggaacactactctatgattacgaggcggcagttttctttatttttttttgccttttcttttctctctgttggatgctgagagcccgagatggcagttcgagctcgggggaggtaatttctggcgacgtgcgtccttggcgatttgtatctgaactgtcagtatttcgatctaacatctgctttcgcgcgggcaggctgtatcgtctgcttgccgtaaccgaatcgaatttgccccggttgatgatggcaacgagatcgcttcgcgttcttgaatgtctccatacaacaccacccatcttcgaagtcagatcgatgcaagtatcgaaaaaggtttttaatctcactactggattaaatcggcacgataacatgtttttccatcgtcgcttcacagaagaacggttgtttcagcaactgacaacagcctcacagggaaacttgaacgtaactcgggtctgagaaatacggtgggttatgcgtccatgtcgacgaagacgtatcatccaatgaaagcaaacacattccaaatctaatttcgcaactagaatgtcacagtccgttgatggaaggtcaatgtgccggaaagggagggccaatgtttgcccgtgacagattcagaacaatcccttaattaccttgctgattcgggaatattttgctttcagacagcaccctgaatcacaaagcttatctatataaaatgtcgcagcgatcatcaactcacacacgtgaacaagcataaccccgtttttcagtccaaggttccaagttggttcctttgataatccgtaacccaccagcaacaccgactcctccatactcaaaccttttagcatgaattggctggattctttggtgaaagagctatcatgtaacacgagtaacataagggttcaggcccatcagattacgcaatctgcggcacagtcattcaaatcaaaaccaacaatggaataagacaggtaacgcatatttggcatagaaaagtaatatcacgaggtagcagcagtagtagtatagtcgcacctggtggagtaatctgctggggcaagaagcgaatgtacgtaccaccaaccacaccatttgcgccgtttgcggctttgcgcgtcgataccccacgaaagacagaagaagaaagcgaagagagccaaacctttgtcttcaagctgggaagagcgccacgcgaacccgcgaggcgttagctgtcacgacaaacgccgactgtaccaggcagcgacgcaagcgtgccgatgataaacaccggagtactccctaatactaagtaagaaaatcgtttagaacaatgtttaaattaaactttaggaatataaatcatgaataactcaagttgttgagtttgaaaatgtaaaaatttgtcttgaaaaatatttttataaaaatatacatataccacttttcaataaatatttttatataaataagaagttaaatttatgctttgaagactgtgtcgctgtccaaaataactttctttacgagtatagagggagtacagtagtagtacgtggaaccagcccgacgcgcgcgcgcgccgcgcggcggatcgcgacacgaccgggagacgcctcggcccatctgtataatttgagccacgcaatctctactgtacatgcaggcgcacatgaagggaggtggtaacgttgctggcgcgcgtagtgagacatcgccggccgcgcggggcgcgacggggcggcggggccagctgaaccaacggtaactggcagcggttggcgtctcgcgacacgtgaccgtgacggcgagctccgcgacacgatgtggggtttgggtgtgcgtgtgcggcgcgggccagtcctcccgttggtgggtcgcctttctcttggctctgcgtgctgcaaagcgaaagcatggccatactcgttggtcagctcgcctcgtgtttcgtcccgatttacggtatcagcggtcgggtccagccagcccaggatcgaggaaagggaacaaatcatcgatactacggctatgtttagagctgaaaaagttgagaggctggaagaaagttgttagtttggagaaaaaattggtagtttatatgtgtagtaaagtttttgatgtgatgtaatgtgatgaaaagttaggaatttggggaactaaacacggcctactagtacatactccctccgttctataatacaagagattttaagtttttgcttgcaacgtttgaccactcgtcttattcaatattttttgaaattattatttattttatttgtgacttactttattatctacagcactttaagcacaacttttcgctttttatatttgcaaaaaaaaaaattgaataagacgagtggttaaacgttgtaagtaaaaacttaaaatcccttatattatggaacggagggagtaatttttttactgttttctttagccaggaagactttttacagtgtagtgttattacgactgggcgctatatttgctatagcaaagtgagtagtagtactgctgctcgctgcctttgcacaggctaccaccgcgatcgcgaaataccggagtgcgggcactgtgcggcaggtgatcagcaggcaggggcgcagggcattcacgtttcacagtagtgggcatgagcgcgctgcggaacaactgtcacacactcgcacctgaggacgcgatgccaaccaaaatgcttcgacgatgccaaccaaagtcgcatggcgcaccggctgcgtcacaactcacgactacaccgcgccgccgtcgcttgtgtagttgtgttgaggatgaatagagactatagaagtacatagggaagccgtgatctactcgacggcgaacatcgggatggcctttcggcctctgacgacggcgagggcgttgggctgtaattattagcctgtaaagaagcccagatggctgtcgactgggtggcctacatacagttttgggcagcaggcgaagagaagatgaattgggccgtaatggtgatttgagccataatggtgatttgggcccaatacaaatttcgcgacaagaaaggagcccagagagatggcgggcctggggtgcacagcaccgatagttttattgggccatcatggtgaattgggcccttataaggctccgaaaaataagggcctgttcactttgatgtcatttttaaccttatcaaattttagtaaagttgccaaaaaagtggctacatttagtttgctgccaaattttggtaactatataagaaatcctgtcaaaattttggtaatgccaaaatttggtaaggttttttttttggcatcaaagtgaacaggccctaactttgcacttgagcacccaaagaattctgaacaagtctttttttcagattgttctgcagggagaataaccttacagtcttacacagcggcacatagcaacttgcccaagcttcttgaagccaggggatccagatggccttaatatattcttaggtaaatctccagcctattcttaaaaaaaatggaaaaaaaagaaattctatgacaagtaacatgcaaatgcagctttacaggagaattcttttctggcagtagccaacgggactgcgacaaccttcacggatctatatattatattattaagacagctcgaaaagaagacatcacgttcatcgtggaggctagaaattcccacattaatcgaagaaaaaaagaaatatctacaccgttagatcgtagtgggtctagattataatggttcaggttgagctatgaatatatagaaatattactgtctttctacaaacggataaagagttagagaaataatcatacacagcaaatatccccacacttttgctgtagaatgaatcggataaaacaagccgaagcagagttggattgcatatatgtttgcagccggattaacatgctgccgtacatgtgctgtccacataagcattctcatgcatgtcataacataccagtggacctacaaatgaaacaagcgatggagcaaactagcaagctgttgacccatacatgtttatgtagcctgggtaccatttatattggattcagtatcatctggattgctcattgcatgtaaattatagccttgcatgtatatatacaactacaaacatttactccctttgtatccctaaataaatcgttgactcaaaatattattgaaacactaaaatatttacatcattaagacatagcaggtttagatttccatctcgcattacccagtctatagcgaatttcctactcgaggtcgtgctcgcgaggcattgaagctaacaatcgtcacctataactcgaggcattataggtgtcaggttgttaaccctaactagcatcatatcgttgccttcggcgatagtcacgataaagtaaccatttatggtaaaaaaaccaatcggcattaattctggaacgggaaaagcaaaaccaacttggtttgcatttatcaaaatcagacgatcagcttaaatctcaagttggcaactagaaaccacatgcatgtatatatgtatcaaccgttagttgtggtgagcacacgcacggagtctgttcgatgctcaacatacacggctggaaaacataatcgattttttcaaatcctaagacaacgattaacaaaacttaaagaaaatcatgcgtaaaaaagttagataattttatatggcttctagcagcataatgtgaggaccacctagctattacaattcagaaatttccagagccatcgtttcgcggcatatttgcaaacgaaaagtaatttgtgaataaaacttatatatatatatatatataaaggttgaaaatttaaattttggcagataagtataaggataaacgaaaagatgaggcccttcgtatgtggaagctagaaattttgacattgatcagagaaaatataagagtttaaaattaaagatagtccatgtataatacaatacaagattaattaaaattaggaaaaagaatacaatcaattcgaaaatggaaaaggagaaataagagttcaagtagaaataaaatctataaaaaaactaaatttcagaataaataataaataatattaaaataaaagaccatctcgaacataaacacgagattaagtataattcaatataaaaataaataaattcagtaattataaaaataaaaatattagttcaactagggagacaattaaaatttggaataaaaaataatttaaaaagtccatgtagaaaataggagcacaaaattaattaaaatttggaataaaaaataaaaataaaaataggaataagaaaaaagaaaataagagtaataatataatttataaatagcacatatacaaaatagaaaataaagaatattaaaaaaagtctatctatgataaagggtggcaaatgacgataaagaatgggacattatggaaaatgactatacggaacgggatatcaagcaagccgtaaaggggtaggatgataacaattgatgggacatctaatactatgaaacaacacctaaatgatgattagattcaatttttagaatcctaatgacgattaagaggaggggcgacagggtggctgtgaaggagtattgtcgcgatggttgataagacttctaaaaagtaaaaaaaagaaactaatgataatcaagtttaatttttataatcccaatgataattaagaggagtacaatgggtatgccgtaaaggagtatagtggttaagtttgataggacttctaaaaactatgaaaaagaaagcctgacgagacatgtttttaaaggttccaaagggtgatgaatagaagtcgtgataaacatgataagaaaataaaggggaggctaaggagtgtggggtgccgattagtgttacttttaagaattactactataaaatgatgatgataaggttcattttcaaaatatgtaagataacgagatgactatttagtaaattttaaagaaaaatgtgtgtaaaaaaataattttgaatggaagctagccgcgcagttgcgcgggccacccagctagaaattcccacattaatcggagagaaataaaaaaaagaaaaggagagtccaaatagaagtacaatctaaaaataacttaaattcgaaattagaaataagcaatatggaaagaggagtccatataagaagccaatacggcattaatcaaaattcgaaataaaaataaaataaaatccaaaattagaaaaggaaaggagagtccaaaaacaatatggaaagaagtgtccatataggaacccaataaatccaaaattagaaaaggaaaggagagtccaagtagaaatacaatttaaaaatagttaaaattcagaattaaaaataagcaatattgaaagaaatttccatataagaacccaatacgagattaatcaaaattcaaaataaaagtaaaataaaatccaaaattagaaaaggaaaggagagtccaagtagaaatacaatttaaaaatagctgaaattcggaattacaaataagcaatattgaaagaagtttccatataagaacccaatacgagattaatcaaaattagaaataaaaataaaataaaatccaaaattagaaaagaaaatgagagtctaagtgggaatacaatttaaaaataactgaatttcggatttaaaaataaggaatattaaaagaagagtccgtataaaacccaatacgagattaattaaaattcagaatcaaaataaataaatcaaaaattagcaaaagaaatctaaaattagaaaaaaaagatttcaattaggaatacaatttataaataactaaaatttattataaaaataaagattattgaaagaaaataccatctaaaacacatgacaagataaattaagtaacatgcctataaaggagtagagtggtggcggttgatacgacatataaaaattattaataaaacatcaaatagaatcttaatgacgattaaaaggagggacgtcatgcatgccgtgaagcaaacgaataaggcggttgccgagacttctagaaagtaaaaaaaaaccaggccccattgataatcatattcgatttttaaaatctcaatgataataaaaaggagaagcagtggacagggtgtataagagtatagttgcagagccgtcgccgatgggacttctagaaaataaaaaatgaattccaacgatagttatgttcgatttttagaatcacaatgacaataaagagtaggcggtggacgggctgtagaggggcatagtggcatcgtatgatgggacttctaaaaattataaaaaaaataaaactacaaaatttttaaaggttcggaacttctaaaaagtaaaaaaaaacccaatgataatcatgttcgattttaaaatctcaatgacaataaagaaggaaggcagcgagcgagccatagatgagtataatggcaaagccgctaacggtttggcaggacttctagaaagtaaaaataaacccaaacaataattattttttatttttaaaatctcaataacaataaagagaagagacagtggacgggccgtaaaggagtataatagcaacgtttgacgggatatctagaaattataaaaatgaaacccaacgtgacaataaactctaaaaactataaaatccaatttttaaaggttccaagaagaatgaatagaaatagtggtagatcgagcaagcaaataaataatgagatgacataaggggtagcaactggtgtgacttttaaaaactatataattagaaacacgatgatgataaggtttggtctttcaaagtcttaagacaatgagatagctatttaataaattttaagttaaatcatactaaaaagtatatgattttgtttaggtgctagccgcgcaattgagcggaccacccagctagtttggatgataagagcaccataaattcacaaccacgtttccagtacactagtattgttgatataatccaagtcgataaccccaaccgaaatgtttgaaccattaaaataagaaagcatctttgaaaacgtgctccaagaccttcctttctcgcaatactccagtatggtagtactaaggtggctgcaaagcttggaacaataagcaagtgttttcccctccctcttgcgcaccatgggaaaaaaaaattctgacgtgacaaatacagctactactcgcataaactacactcaccgccgtacaccactagattgtatttaacgcagcaagttgaaaaatgttagagcaaaaacaacctccgccattccatggcaacgcacatttttttactccgttttgtttggtcatactcctgcacgtcgtccagtgttccaccagctcgacggtctcgattgaccaggcctcgcccgcacgcgagccgctgactcttcccggctgttcactctgcggccacgtccttctccgccacgtcatgctctttgctcacctggaagattttggtccaccccgtcgacgacgaggtcagcagcatgctgctgcgcgacgtcggcgtctcgctgtcgtcgtcgtcgccatcgagcgcgacgggcatcgcgggccacatgaacgccggcttcgacggcggcacgtgcggcggcggggcggcgcccgtcaggatctgcaggatggcctgcgtcctcggccgctccccggggttcgggtggctgcacgcgaggcccagcagcaggagccgctcggcctcgacctcgtcgaactcgccggcgagcctctggtcgacggcctcgaggatgccgccgccgccagccgcgccgtggagcttccagacccactccagcaggctgagccagccggggaggtcgctgcaggagacgcggcggccgcagacgatctccaggacgacggcgccgaagccgaacacgtccgactcccgcgtcgcgcggccggtgtggaagcactccggcgcgatgtaccccagcgtccccgtgacgccggccatgtcggtgtacgacgtcttgtcggactcgagcgcgcgggcgaggccgaagtcgccgagccgcgcgttgaaggcggagtcgagcatgatgttggacggcttgatgtcgcggtggatcaccatctggtcgtactcgtggtggaggtagttcagcgccgacgcgacgccggcgacgacgttgtagcgctgcttccagtccagcgccgccgcgcccggctcgccgaagatgtgcctgtccaggctgccgttcggcatgtagtcgtacactagcaacagcctgccattttggcggcaccaacctgcagacgtgcatgtcgtccaaaatgtgtttagaacttgcttacagaatttcgtatcattttgaaatttgaaaaatgaagactgaacgtacggtgtttgttttgggatatgaatgtctcctcttatggtgaattggcagctaattaaactatatatatatatagagagagatgtgcatttgcatggctgttccaagttccaactaacgaacgctatatttcttctaacacaatgcaagcaaaagatcaaatcttgcattatcatattgtcaaccagagcactccaatatctatcttatgattcaatctgcttgcaaagacgtcatggactgatgattcaattttaaatttagctgccaagtggcccaagttgccacatagcgtggtgagcttcttaaaacatctatttgccgtgccaacttgtgtgccatctcagaatattatttcctactccaaattattagacaaaccgtacccaatctaatactctaatcacaacttcaatctaaactaagtatccttttcggttaaccagaacgagaaatgatcgcttaccgacgatcttgacgagattgcgatgacggaggcagttgataattctgagctcggcgaggaaatcctccttccccttggtgtttgcaccggagaactgcttcacggcgacgtccgtgctccggccatcttccccgaccacggtggcgcggtacaccacgccgtacccgccctgccccagcttcatcttctcgtcgaagttgttcgtccctctcctcagctccatgtagtcgaactccttgggcaaacctgggatcttcctgaaatcaatggcggcgttgaacgccgagctcgggtcgccgccgctccgtctcctcctcttccggatgtacagcgcggcgaccaccccgagcaccacggcgacgccgcacaacacgccgacggccaacttccagccggacgtgccggctagcttcgtggcggtggtggtggtgccgtcgtggagcctctcgacggtcatgttccacatgcgcacgcagttgagctggtacgtcgcggcgccggtggacgccgagaagccgaagtacgccgtcttgccgaggaggatggtggagaggtccagcgacgcgttgagcacggcggcggagggcttgctctcgttcttggcgatgtacaccgacatccgccgcgacgtgccattgtagtcgacccagacaaagcagatgccgtcgtcgacggtggtgttcctgggcgcgagctggatacccagtggggcgagtggcgccgcggcggtggatcggacgccgttgacgtcgaggccgacgtggttgtcgtcgatgtcgtagcgctgcttcactgtgtccagctccacggccacgaacccgttggtggcgttgccgtcggtggaggcgttggtgaggccgaggaacccgccgtggctaccgaccggcggcccgcgggcgttgctcgacgcgacgacgaacgcgagcccctcgcccttgaccgtcttgttcaggttcgagcggaacaggttaaccttgaacacggtggagaacgaggcgacgtactttccatcggcggcagcggcggcggagttggacgacgacgacgacgacttggattcccagacgacgaacggggcggtgaagaaggcgtggccggcctggttgacgaggaatatctcgggcctgttgccgctgtccggggtgagctgcaacccgtcctgggcgatggtggcgttgcctgagaaggtcaggttgtcggggagctgcaacaggggcttgtcgaacttggggaaggagaatgtggtgaactccttgccgtcgacgttgctggtgaaggtggtggcctgcgcggtggcagatgggaggagcaagaaaacggacacgcaccacactagcatgagcacggccatggcggcacggcggagacggcgcagaagcaacatggagcagtggagttggcgatgcataagtaaagggagatggagttggtgatgtactgatgtacagtcaagggggtattcgcgggaaggaattggtccagtggttgtcgacttctcccacttgcggacttgccaatcgtgccacctgccacatacattgtacataactcttcttctccaagagtccaagagagaccatgactgaacaaagagaccaagacagactgggaccagcaacttccgattgggttatgccgaaggttcatgcccttcttcggaaagcacattagcatcctttggaagttcatgacttctccgattgcagatttgcctaacaaaatacagagaaccaattggctccattaacatttgcatggtctacaatggtcaggtttgatccatgtattgctggggtaagtaatatataagcatggaagctctcacgttgcaagccacagatgtcagatttgctcccacaggtttgatccatgtattgctaaagtttgctctcacgttgcaagccacagaaaaggcagtgtgacagtgtaatgtgaagtttaaggtccagtgtcgaccagcactaagacaccgttcttttcagaaacttgaacgtgtagctttctcatcttcaaactgtaaacgatatattttgtgctttttttcacaaaaatcaaataattccatttcctaaatttataataattaatagttagttattcatgtgttaatgactcgtgttattttacgtgccgtaaaaactaacctctaacttgaaggatcgaacgcaaagaggaacatgttgcacgcgagtataaggagcaatcgcctatcatgactaatgcttacacattccgctatttggaagtgatcaagccaccattgttacaccaattgagaacattacagcttgacatcaaagtatgaagaaaatgaaacaaatctaaacaccagtagtcttgtactccactgtactaaagaagctcccagagcaaaaaaaacaaatggaaagctcgatagcatattcatggacattatttacacctttcatccgtcccatctttgttctcaacgttgtcaccaactccacggtaacgtgccaaatccgatgcgatgggtcgggtcccggccgcacgtgtgggccgtggactcgtctacggtcacaccgtcgccacgtccctgtccgccacctcgtgctccttgctgacctggtagttctgggtccaacccgacgaggacacgtagtacgacgacgacgagttcatcaccgtgctgctgcgcgacgtctcgtcgtcgtcgtcgccatcgagcgcgacgggcatcgcgggccacatgaacgccggcttcgacggcggaacgtgcggcggcggggcggcgcccgtcaggatctgcaggatggtctgcgtcctcggccgctccccggggttcgggtggctgcacgcgaggcccagcagcaggagccgctcggcctcggcctcgtcgaactcgccggcgagcctctggtcgacggcctcgaggatgcggccgccgccgccgccgccgcccgccgcgccgtggagcttccacacggcctccagcagctggctgcacccggcggggttgctgcaggagatgcggcggccgcagacgatctccaggatgacggcgccgaagccgaacacgtccgactcccgcgtcgcgcggccggtgtggaagcactccggcgcgatgtaccccagcgtccccgggacgccgatgatgtcggtgtacgacgtcttgtcggactcgagcgcgcgggcgaggccgaagtcgccgagccgcgcgttgaaggcggagtcgagcatgacgttggacggcttgatgtcgcggtggatcaccatctggtcgtactcgtggtggaggtagttcagcgccgacgcgacgccggtgacgacgttgtagcgctgctgccagttcagcacctccgactccggcccgccgaagaggtgcgtgtccaggctaccgttcggcatgtagtcgtacaccagcaacaagacgccattttggtggcaccaacctgcagacaggtcgtccaaaatattttaggattgtgtattttggtacaccactagcttattatcaatattgaatgcttatcccaagagatagaattgtgtattatttttgaaacgtgaaaaacgtagaatgaatcatgttggttttgtcaatgacccaattattcaagtcagagacaagtggttattctcaagattaaaaaaattaataggatttccttaaaaaaaaggcttaattagtgttgcaaggtatacagaccgttctacaactactccgtaccaaatatttttctccgaacaacaatgcaagcgacaaaacgatgtcaaacctttgccttgatccaacctgtattggccatgatccaatccgctcggtaatcggtgggaactggtcagtgtttaattttgaacttaggtgccaagttgccatgtggcgtgctgagctgctaaaaatatctactagtacatctgttgtgtgtaattatcttagaattttatctgctacttttcttgagataaaggcagtaatcgttgtcgtggtgtatcgttttcatgtgattgtgggtatgaaaaattgcttacttttgtctattctcagacggctactgaaatttccgacggctcggaactcggaagctttcattttcacgcaaccgtacgaaggaaattgttgctgagaatgtaacagttaaaaattggcacgagtagacaacatctacgcggtctaataacaagtacaaagtacaaagtctaaacttatcggagcatccatttcaataaaagcgaaaatatttcaaatcaaatcaaatcaaaagataatctggcgatttgggttggcatttattaaggtgatgttcttgaggaaatatttcatcacgaaattagcagttcatcagggcggcatcaatgtcctactcagctattcttaatcactaaatcacaaaaagatactatcatgcatcgaacaaaaacataaacaatatcgagctaagatttgaatgttcagaaaagtagtagagcttaccgacgagcttgacgagattacggtgccggaggcggttgatgatgctgagctcggcgaggaaatcctcctgccccttggtgttggcaccggagaactgcttcacggcgacctccatgttctggccgttctccccaacgacggtggcgcggtagaccacgccgtagccgccctgcccgagcttcatcttctcgtcgaagttgttggtccctctccttagctccctgtaatcgaactcccttggcacacccgggatgctcctgaaatcaatggtggtgttgaacacggagctcgggtcgtccccgatcctcttcctcctcttccggatgtacagcgcggcgaacagcccgagcaccacggcgacggcgcaggatgacacgccgacgaccaccccgagcttccatccgggcagggccgccttcttcttggtggcgccctcgtcggggagcatctcgacggtcatgttccacatgagcacgcagttgagctcgtacgtctcgccggtggacgccgagaagccgaagtagcccttgttgccgcggaggacggtggagaggtccagcggcgcgtcgagcaccggggtcgagggctttctggtgtcgttcttggccatgtacacccacacgtgccgcgacgtgccattgtagtcgacccagacgaagtagttgccgtcgtcagtggtggtgttgctgggcgcgagctggatgccgaagggggtgagggaggcggaggcgttggagcggacgccgttgatgtcgaggccgacgtggttgtcgtcgatgtcgtagggctgcttcacgctgtccagctccacggccgcgaacccgttggtggcgttgccgtcggtggaggcgttggtgagaccaagatactcgccgtagctgcccggcggcgggttgatggcgttggtggacgcgatgacaaacgccagcccctctcctttcatggtcgtgtttgatcggtagaggttggccctgaacaccgtggagaaggaggcgacgtacttgccatcggcggtggagttggacgagttggaggaccacaggacgaacggggtggggaagaagacgcggccggcctggttgacgaggtagtccagaggattgttgctgctgtccggggtgacttgcagcgcgctctggctgacggtggcgttgctggagaaggtcaggttggcgccgagctgcatcagggacttgtcgaacgtggggaaggagaaggtggtcgccttcttgccgtcgatggcgctggtgaaggtggtggtctgcgcgcgggcggaggggaggaacacggaggcggacacgcaccacagcagcacgacgagggcgcggccggccatggcgccgcggtggcgacggccgggaaggcccatacggaagggcaggtctgcggaggagttggccacgaaatggagaaaagggtgggggttggtgatgtagcaaggggggtttgctagctcgcgagccgcgacttataaatggaagtggacggttggttgcttccttgctcgcgccattccattccccagatctgattctctgcttgcagaaactctctgaccttcctactgatccaactaacccgcaactgcaaggctgcaacgcaaacgtccataatatgtactgttttttttccctccctcttaccgcgtcatagacaaaatgtccgtgcaacagcgatcgtgactccatccggaaagaagaaaaatagtaggccggtttgttgctcggcatgtcactgtataatctgtcaatgggaaataaaatagtaaatgtcaaggcatatatcaatttcagagtacacaaaattcagatgtctcaaacacagctaacaggtttctcccaaacgaaataaacaagatcaatttcaacactggtactgttggttctaaaaaaacaatgagagagaaaaaagaaaaaaaaagcaaacatactcataaaacacccggcgaaaacatactcatataacagaagcttgcacagaaaaaaaaaagtgattacctgcaggcgaatggctattacctccacattaaaaaattggaatcctgaaggttagaacatgtgctggtgtggctccagtgatgtttttgtctctgtgcagaaggaacgggctaacccgcaactgcaaggctgcaacgcaaacgtccataatatgtactgttttttttccctccctcttaccgcgtcatagacaaaatgtccgtgcaacagcgatcgtgactccatccggaaagaagaaaaatagtaggccggtttgttgctcggcatgtcactgtataatctgtcaatgggaaataaaatagtaaatgtcaaggcatatatcaatttcagagtacacaaaattcagatgtctcaaacacagctaacaggtttctcccaaacgaaataaacaagatcaatttcaacactggtactgttggttctaaaaaaacaatgagagagaaaaaagaaaaaaaaagcaaacatactcataaaacacccggcgaaaacatactcatataacagaagcttgcacagaaaaaaaaaagtgattacctgcaggcgaatggctattacctccacattaaaaaattggaatcctgaaggttagaacatgtgctggtgtggctccagtgatgtttttgtctctgtgcagaaggaacgggctaatctctcgtcataccgatcggccggtcaatggtcaattttcatttgctcccagcgttgcgccttcctctatccctggtcaaagtcaaacccttgtgatcatctctctatctctttctcaaatttcaaacagggttttgcccaatgagcaagcaatgtacaccctgatcaatctcccgggaaactattataaattctcaaggcgatatcccttattatttacatgtcatctaaatgattataaaaaaattaaaaaaaaattaataagatagattaatatgtgataaatcactccacaaatatgtagggtcaaatttaactttcacaagttgtaacgaaaaaaacaaatttgactgtgaaaacacgttaactagccatagtgttttctatttttttttcaacatgtagaagttgaattttaacttgcatatttgtggagtgatctatctcatattaatctatttggttgaattttttttattttttttcaaccatttgaatgatatataaataacgacggaatgttccttcgagaatttagaagcccctccctcaatctcccttattatgtgttttctttcagatgtatgcgcatctacatgctcaagtacagagaacatacgtgccttgtagacttcttatactagttcaatcactgtcatgtattagtacatagatatacaacatcatatgactagaccaagggtgtgtttagttcatatcaaaattgaaagtttggttgaaattggaatgatgtgacggaaaagttggaagtttgtacgtgtaggaaagttttgatgtgatggataagttggacgtttgaagaaaaagtttggatctaaactcagcccaaatgtagtttttgagtttgatgtgaccggttacctaaagtgtctggattagggaaattccttcgcatggacccttctgcgaagcctgctggataggcattatctttcgaggtagctctcatctggagtccggacctggaggtgcctttcactgctctggccggcaaatcctgcgtcagcaagctacaataaaaattgcaaatctgacgtatatgatcatgacgaatgattatccattttcctaaggccttgtttagttacaaattttttcttcaaacttccaacttttccatcacatcaaaactttcctacacacataaactttcaacgtttccatcacatcgttttaatttcaaccaaacttctaattttggcgtgaactaaacacacccttttctagcaagtatgctgggtaaccacaatagcactagcattgtcaagtctgtcacacactattttttacacctatttaccctgaagctgtgcattttactatccacttaacagttcgagtacacacatacgggaaggccaactgcacaggcatcaatacactacggcacatgggggcgtcaattgtatgagttcatgcatagctgttactatctctaagaaaatagtgccactcaaaccccgacaagcacggttcggccagtcagcgaaacgacttcttctagtaagtgaagcagattttagtagaggtaagttctaagtaaagtgactgcaaaccttggtacgagaacatgaatgtaccatagcccagaaattcagcaggttttgtagttctctaatacaaattgcttctcttcttcttgagttaaatgtcaggtactgcctctcaactaagaagagttgacagcttgacatgtttatgtccaaggcatcacttgagaaattaccttgcttcacctgctggacatcaagagagcaacttaaaaacctgtcaaccatgcaataacaattcaacgacagctcataatggcatcagctgtggtttaaatttgtgtacctgtgtcgtttatctttacctctgaatacaaatagacaagccccctttcattttgtgattacatgacacaccttttaattaatactggggagattggtaagcaacatcagcaataatttgaattattgattttttaagtaaataattggaacaaagatgaaaattaaaacatgtaggaaaactacatttcttattaacaaaacagataaaaagcacacaaattggatcaaagtattaaacaactcgaaccaaggtggtggtctggtggagatgtacactccaccgagttaaaattagttctaccgaatacctggtatagtcctgcttgtacactttcagtacattttactgaaatatcaggaagactgatcagtaatcctcacagaacatgaatcagttgtacttatttattcagagtccatttaaactgagcaaagaaccaactagtaatgtgcaactggttgatttatataataataagaggcaacaatttcccttgtgaacacaactgaattgtctcagtttaactaagcctgtggagtcatacctttaggaagtcaccataaatgatgcaaccaaatctgtactatttcatatgaacaggagaataaagtcagcatggcatatttaatcaactgatttcttcaataatgaggtacccacacgcgtaattaattagatttctctctgagcaagtgtttcagtgatatagtatttttgtcatctaaccataaaacttaaaaaataacatactttcagtgattccatccaattaatcccgctcagttcaagcaaaatcacagcatacatgacaaacacttgttttttttgcaaaaggtctcttctgaaaataatttatcaagaaaggtcaacaaaccaatgaaatgaagatgcacatcgatcaaaaatgactagatcacctgcttcttttgatttcggtatcttgatggcttggcatcaagaaaaagcatgtgactggtgtcattttttttattaaaaaaaacagtagtctatggtagttggttgccacagtggtatcaggaggaaatatggtaaaaagttctgcatttcagtctttcagttgaaaagtgttttagagcccagtgcactcacttcttaagagctgccgatttactgcttcaacaagattaacatcgttgaagggttgaatcatacaaaaaaaacaaggataagcttggctactttgtcatcctagtcacctaattattataacactgctcagacataagagctgcaagcgtatgcagcttgtgtcacaattgtatcacgaataagcaagtagtcaaatcaatcttatatggccaattagcttttgtcctgtgcattacctaatgtctcgtatattagaaaaaaaaaagaggatcttatcatcaactaccattgaaacagcaaatagccacgttcgattataccaaactcaaagtttcataacggacgtagctaatgagcagttgagtccagcaaccattaaaaaggccatgctaatttagtactattcatgtcaatttgtagttaaatgcgtccaagcagcagaggaaatcaacccgccgcgaggcacaagtcaatgtcgcgacatgccaccaacctgaacagcgcgatactgccgagcatcacatccagattttatgcagtccaacggaagaaattgctgagataaacgcgtgattctagagtgaaagcgcaatacctgaaaacgacactggaatttgatcatttgaaccgctggtcacacatcgatgcccagccgggcaattcgacgaacaccgcaggggcatgaagctagacacagcggtgttccgcgagcgattgtgatcggcaacatccacgtagatgagaaaacaaaccgagaaaaaacgacctttttatcagagagagaatcaaagagagtcgaaaggagaagagaattcggagatggacgaacaggcagaggagcagcggcgtgcggaagagatgagagacgaacaaatccgcggagaagttgacgccgtactgccgaagcagggcgatgcgtcccaggagcctataaaagccctcttggctagccagcctagcccaacctgacttccaccgggaggagttggattctgcgtccccggctcgtcaaactcgattgggcctcggcctcgcttgatctgctagaccctgtcgccctgcgagttgtggaaaaagtacaccgaaggtccctcaacctgtcatcgagttacaaaacgttccccaaccacaaaaccagatatatggcatccctcaatttataaacgggaatgctagggttatcccgtcccctagcaggatactcctcctccacagatgcgattctcatccatgcgacgcggctgaaggcatcaacgcgcgcccgtcccccgccgccgccgtccacgtcccccatcgccgccgccatcgccgccgcgcccgcccccaccgctgccgtcgccgtccctcgccgccgccgccgccgcgcccgtccctcaccgccgccgtcgtcgccgccgcgcccgctgccgccgtcgccgctgcgcccgtccatcgctgccgccgccgtcgtcgccgtctacaagggacgactgcaggtggccggccgcgcgtcgagatgctcctctccccaacgagatgtccagttatatctagtaggaatcacctaatacctggtaggtatcatccgatacctagtaagtatcgcgtgatacatagtagaaatcatcgatatctgacatgatacctcgtgagtatcacgcgatacgtggtagaaatcgtctgatatcttacaggtatcacatgatacctcgcgagtattacacaatacgtggtagaaatcgtctgatacctgataggtatcacatgataccttgcgagtatcacgcgatacatggtagaaatcgtatgatacttgataagtatcacatgatactttgcaagtatcacctgaaacatgtgtagaatcgtctgatacctgataggtattacacctgatacctactcgggatcatcccgttcgaaaacgggattccgttatatagtagccccctttataaaaaccattcactttgggtccttcagtggttttgaccccggttttgtcccacgtggcggctgagtcaacgtgagacccacgtgggcctctgttgacagaaaacacgtggcctaggagatctgcttaactccagtgcagatccaaagctcgccttcagatgtgttagcgtgccagttgatttgatcctgtaatcaacaagaaatataagcaaaggaaccgtggttaaatctataaatgatagccgatcggctagatgccgatgacatatcatttatctttaagccgatgtcatctgtgcatcgatcgacagtcatgaataagtaaagaagaactaaatctactcgatcggctgtagatattcacgatatatactccttatatcgatgtatacttaaatcaagtgattgggatagatcggtcatcatgccgagacagtataaatcacttagatcgaaatatatatcaataacaggactatatatgtttatagcatagccgatcagatagatctagcatgtatcggctaatactccgatactactctatatcaggatattaaagtaagaataatatactgaacaagagcctaatatacttagacacaacaatatcttgatatagagggcagatttaacatgtcaatgaagcatatagaacaaatataagtaaatcagataagatcggctgaaactctgacgctattctaatcggcaactagaaggcaggctatagatcggtattctaagcacgactcaataggtcaaactcaactgatacaacattaagtatgaaaagaataacgatatctagacaatcaagccgctagaagtttcatagaatggtagatatctcttataatctagatcaacatcaagatctaacccaatcagctgccctctgcgtacagatgttagccgatagtagattaggtggcgatattgctagagattatataagatatatgataactcgacgaattatataaataagattagagtatcataaagatggaagcactaatcgtaaaaacataatccgtcataacgagttttacctcttgttgaagatcgaaaccaatgcagctcaacccgaaagcaagaactcgtcgaaacaaaactaaagcaaaagggtggcgatgcgccaagattgtattgaacgtgtgttgttaattacataaggctcggggtctatttatacctgagaattacaagatatgcccataccggacacgactattatctctatcaaactctaagataccacaagtctttgcggcagacttttgcctatatttattgacggagcgtggggctcctcaccgggagaccgcgcaggcccccctttgccggttcggccgggggcgctaagtgaggttcttcgccctcgatctgaggaacgtcagcgagagaggaagtgcacaagacacgggcgacgtagacaggtttgggccgctgagaagcgtaacaccctactcctgtgttctggtggatctgtgcgtgaaggaatacagagagccggagagcgagagagagttcaggctctagcccccattcgccagagtcccaacccctcttcctctttttctcctgtttttttctccctcctctccctctcctaggcctgggcctcctttttatctggtcaggggtcaccacatgggcctccagctgcctaagaaaggaaacatgctttttacaatgagggctagtctacagccggaagtgacctctgacaagcagagcacacgcctcctgccccgctcgccagctttcccggtggacgcccatttcaaccttcattcaatggccagcgacttccttgccatgcttgcgctgaagcctggaatggatctgaccgggactgacataccaactccaagagttagcacgccggctccggctagggacgagagccaggaagctctcatcatttcgacgggacggggcgaggcgtgtgacaggccgcctgttgccacctaacccgcgatctgaccggtctgtgaccggtcacacaccgcgaccggtcacggaccggataagcgtgcgctgcgccgcattaaatgcggcgtggcgcgctcgtccaacccgctataaatgcggttaggtgagccccgctgtgctcacctaacccacacacgtggcgccaaaaccacagggggtcggggcgccccagccctcggggccgaaacgggggcgccctagccctcggggccgaaacgggagcggcccgacccctcggggagacagagggaggggtggccacgtcaccctcgggcccgaccccccccccccgagggggtcaggccatgtgggtgaccgcggctacccaagcctctagtcacgatacccccggccccatgtcaccgacatttatctataaggaatttacataaaatattctaattaatagatacaattgccttcccaggactctattcgtgcgtggcaatcatcttgaaatacattaacttgaacccgatgtcgcgtacgattcgtattgtcggaatcggctgtatcggcttactcaacccgactcagacccagctgatcctaatcgtagccgatttggacttcagccgattcctgctctgtttccgaactcgatctccgcctccaactttgctttgatccaatcttctttcctgacatagatgttaccaaatttggttgttaacagccccacattgtcaagatgccacatcagcaccctccctcttcattctcctctcccttcctcctcctctctctctcactcttctcttctcttctctggcaagccagcggcgctgctggggaggaggccgccggggcgaggcgagaaaggaggaggcggcggctgcgacgcgagagaaggcgagggcggcggccggtcacgaatggtgttgtgtcaccaccggcggcgaagcggccccgcagcgttgggcgatgaggggaacggcggagcaggcgagcaacgacggagcgggctgatggcgcgcaggcaggcgaagcggggcgacggcgggcggagcggcgacgcacgcgaagcaagcgggggtggcagggtggcggcgggtggagtggggtgatggcgtaggaaggcgaagtggggcgacggcgggcggaatggcgatgcgcccaaagccggcggggcgacggcgcaggctggcgaaagccagcagggcggagcaacgacgcgcgaagccaaaggggcggattgggtggcggcgggtggagcgacggcgctcgaagccaaaggggcggagcagcgcggcagcgggcggagaggtagcaatccgccgtcggagccgatccccacagcagaggcgcgtctccttctcccacgttgtcgttgccgccgccgccgccacgtggcccgtcactgaccgccactgtcattcgtataagcgttttatacgtgtgtgaacattagatagagaggattgggacgatgtgcagtgggtcgccgtgcgcgtcgtgcaagctgctgcggcggcggtgcaccaaggattgcatctttgcgcccttcttcccggccgacgaaccccacaagttcaccatagtccacaaggtcttcggcgccagcatgtcacgaatcagtgagatctcccttggcgaaacgccaaactgggcacggatcgagcaattcgggaggaagaaaagaggaactgagtaagaacagagtggagaattgacttggagaggaggttggtgatattgtattttcttattcgttgcctacgaccagcgcttcggcaaagtatataaaggttccagctagtacacagctcacaactaggccttcactcacgcaccagccaccttacaaggccatcaggcccaaatcccaaatagaatagtgaagccaagcaataaaagactcctggagtctaacaattcccttccccttaagaacctgcttgaccccaagcagtagcatcaggaaaacgtgtccggagttggcgcaggttctcccaagtagccagctcctcaggcatgccaatccacttgatcagcccacagggaacaacactcttgccacgtttaatcagacttcgacgaagaaccgcttcaggctgaatggtagattgttcgtcagaatagttgagagggagatcagaactgacctgggtgcctggtttgattgccgccttgagtaaggaaacatgcaccaccggatgtatctgactagtagcaggtaaatccaagcggtaagcaacagcgccaaccctttccaacactgtatacggtccaaaataccgaaagctcagtttctgacaagatcttcgggcaacagacatctgtacaaatggttgcaatttcagataaactcgatctccaacagcaaattgcctctcagaacgcttcttatcagcctgacttttcatcctctgttgagcccttagtaattgttgatgtaaaagttcattcatatgagctctctcttggagccaaagctgcacatccggcactgtacttgcacccacatccacaaggccaaaatgtgtaggctttctggcaaacaagacctcatatggagatttattcagcacattgtggtaggaggtgttataccagtgttgagcctgggacagccaactggaccatttagatggagcaaagtgaactgtgcatctgaggaaaccttccaaacactggttaagcgctcagtttgtccatcggtttgtggatggtaagaagagctcatgttaagtttgacatccgctagtttgaacagctcctgctagaaagcactagtaaaaatcctgtctctgacagaaatgataacctgaggcatcccaaagacatcatacacctgctggataaatgcctaagcaactgtataagcagtaaaagggtgtgcaagagggataaatttagcaaacttggaaaatttgtccacgactaccatgattgtgtcatatttgcctgacttaggcagtccctctatgaagtccatactgacagtcatccaagcttgcatagggactggcaatggttgcaacagacctggagacttgcagtgttcaactttggcctgctgacaagtagtacactgagcaacatattgctgcacatccttttgcaaccctgtccatgcaaacagatttttgattctctgataggtagctgtaacaccagaatgcccaccaaccccactgttgtgtaatgcaagcaaaactgcctgttgtgcttccttatgatgcccaagccatattcttcctttgtatcgaattaccccattaaccaactggaagtggtcacatcctttaggctgaaggggcagaatttccaagagctgtttagtttttggatcatgctcattgacggagcgtggggctcctcaccgggagaccgcgctggcccccctttgccggttcggccggggactctgggtgagactctaagctcccaatctgtggaaggttcgcgagacaggaagcacacaagacgccggcgatgtatacaggttcgggccgctcagaagcgtaataccctactcctgtgttttggtggatttgtgtatgaaggaactacaaagtatgagccagcctctccctcgttctaggttcccaatctggaaaagtctcctcctccctctaagtggggaagatcctccttttttatcttaaggggataccacatgcacccttttcataaatggacggagatttgtatagttgccgtccgagtcaccttctgatgggacggtccacaactacctccactttcgccgggagcagatgcgacgtggaatcgtggctgtctgctgacgacatgaccggtgtcagaccagtcatgtcggtcattcttgtccaccacgtgtcagcttagcaatctatatgttcgtccttcttcacacaacatcttgcctgtaatggttaggatgaagcctggcatatatttgaccagggctaacgtgccatctctgggaggtaacacgctagctccagctggggacaagcgcctagaagccctcgtcctgacgggatggggcgaggtgtgcgtcagatcgcctgtcgccacctaacccgcgatctgaccggtctgtgactggtcacagaccggataaatgagtgcactgcactgcgttacatgcagcgtgacacgctcagccaaaccgcaataaatgtggttaggtgagccccgctgtgctcacctaacccatacacacagagcaaaaaatccacgaggggtcagggcgcctcgaccctcggggctgaggcgggtgcggtccgaccccctcggggggactaagaggagggcgaacacattaccctcgggcccgacgtcccccgagggtgccaggccacgtgggcgattgtgtctgcctcaaacctctagtcatgatactcctgatcccatgtcaccgacagtagcccccggcgttatgccagggcgatcgccctctttaagggaagcggttgggcgtgacgccactcctaaggcccggtgacaggcgggaccggtctcctcaattgggcagaaacccaacggtcacaaatcacgcacatcggcagtggtaactcggctgtcaataatgagcggtctcttcgagactgccacattactcgagtagcacacgaatctggacatggcgattcatttcgtctggagatatggtaacgtcgcttcggtcggcgagcgtaattaacgcacgcatgatatgatctatctcgactgccacaaccgcatatccacctcatgcgccgcaagcgggcgaatgggattagtggaagcgtgggcgcgagaaacgagggggcgaaatagtgggcgcgagaagcgaggagccgggcacagcgctggcaagagtataaaggcactgaggaagggatctgtttccttcctttcgccattattccccttgtcttcgccgcttgcgccctaactccttctttcctgtgccctaccttcgccacacgcgctcgctcttaatcttctcttcctccggcgccatggcacggggctccgctctgctcgatggtagcgtgctgccgccttcccgcattgtgagcgagaggcaggctgggctggcgcgccgtttcatgccgggatctgccaccggccgggagatagtcacgctgggcgagggacgcccggcgccagactacccggggcggtccgtcttctttctcccctttgcaatggcagggctggttccgccattttcttctttcttcatggatgttctggagttctacgatctccagatggcgcacctcacccccaatgcggtgatgactttggccatcttcgcgcatctgtgcgagatgttcattggggtgcgcccatctcttcggctgttccggtggttcttcaccgtacagtcggtgtcgccgccatcggtagttggtggctgctacttccagccacgggagccggtgctgaatcgctacatcccctgcgccctccgcaagaagtgggacgactggaagagcgactggttctacaccccccttgccgacgaagcgcgcctccgacttccgagccagcccccggcgcaggcctccagctggcgggcgccggtagatctgggggatggctatgacgccgtcctcgaccgcctggcgggcctgcgatcccaggggctcacaggggccatggtgtacggcgactacctccgtcgtcggattgcgccgctccagcggcgcgctcggggcgcctgggagtacaccgggtccgaagacttcatgaggacccaccagggagtgagatgggactgggctcctgaggacttcaagatattggtccaacgggtgctgaatctcaactccgtggaggcgtccctcattccccaaggaatcctccccctctgcagcgatccagaccgcgtctccatcctgaccattatgatggcggtcggggcctcagaggagcgagctccaaagggccacgacggcgcaggcgggagccgcagggggaacaatctaccccgggagggggtcgtgcttctgggtcccgcgacaggggcccggggaacagccgccctgccgagtggtgacgacggggagccgaacccacgccgtcgagctcgtactccaccgccccctccacgccaaagtcctaagcggggggaggcactcgagagggtcgaaagatccgcgacttcaccgattgcgggcgatggagaaaaacggcgagatggggagcgtcgcctcctcgtctacggtgacggcagcacgccccagggcgcgctccaagctgcgggcgcgctcctacgtcacccgcccgtcgcccatgacccggagtctccagcccaacgttggctggacgatgtggccaaattggtcatgactgcaaggcagcgtctagatgctggtgggcggtcctccgccaccaaggcctctggtgctgctaccaccggctccgcgtcgtcaagacgaagggcgcggcgagcggcagctgccgttcgccattcggccaccactccttcgtcgactccttcaacccgggaagatctgcgtggggggccggacgcccgcaccagcatcgagcggcggcgtaatgatcgacgtgctacccacgcaacggagggcgcttcctcgtccagagtgtcacctcaacacggacgcgggaatcagccctccgtgcccccggttggtggtgtcggctgtagagcctttgtggcgagtcttcggaatgtccgttggcccccaaggttccggcccaccatcgccgaaaaatatgatggcagcgtcaaccccgccgagtttctccaggtctacacgaccgggattgaggccgccgggggtgacgacagggtcatggcgaatttctttcccatggccctaaaggggcaggcgcggggttggctaatgaacttgccacccacgtcagtccactcctgggaggatttgtgccaacagttcaccatgaactttcagggcacatatccgcgcccaggtgaagaagcggacttacacgcagtacagcgaagggatgatgagtcacttcgctaatacattcagcggttctgtcaagtccgcaacaccataccatgcatccctgcacacgcggtaatctacgcgttcagggggggcatgcggcacaaccgcatgctcgaaaagatcgcctccaaggagccccagactaccgcggagctttttcagctcgcggaccgagtggctcgcaaggaggaggcctggacttggaacccctccggttccggtgtggcagcttcggccgcccctggatccgccgctcagacagggcggcgtgacaggaggaggaagaagaggtcagtccattccgatgacgagggtcatgtcctcgccgtcgagggcgcttcgcgggccacccaaaaggggaggcctgcgagcgacaaaaagaaaaaggccggcgctcccagcagggagcgcccagccggcaagtggtgcaccgtccacaacacctccctccacgacctcgtggactgccgtgcggtcaaaagtttggctgagcgaacgaggaagtgggaggaggagaggaggcaggagcgccgagagggcaagtccccggcggttccttccggcaatcggcgaagtgaggccaagcagaaggcccccgccgaggacatcgatgacggcgatgatggcctaggtttccaagagcctggggccaccattgccactgtcgatgggggagcgtgtgctcacgtttctcgccggagcctcaaggccatgaagcgagagcttctggccgcggcccctactcatgaggcgacgcgccgggcgcgatggtcggaggttgccctcaccttcgaccagaccgaccacccaccatgcgttgcccggggaggacagatcgcaatggtggtttcccccactgtttgcaacgtgaagctggggcgtgtcctcattgatggaggagcggccctcaacatcctttcccccgcagcctttgacgctatcaaggccccggggatgatgctccggccatcccagccgattatcggtgtgacgccagggcacacgtggccgttaggtcacatcgatctcccggtcaccttcggtggacccgccaacttccgcacggagcgggtgaacttcgatgtggcagacctcagtctgccctacaacgcggtcctgaggaggcccgcgttggtgaagttcatggcggcggtccactacgcctacctacagatgaagatgccgggccccggtggccccatctctgtccatggcgacctcaaagtcgcgctcgcttgtatggagcagcgcgcggaccgcctcgccgtcgtgtccaagcccgagggtggcggcgagaggcttggcacatccacccccgccgccccgaggcagcggatagtcacgtgcaatgaggtcccggtcaaggaggttgccctgggcgacggcccgtcaaagaccacacggatcggtggtcttctggacggcaaataggaagacgcgctcgtctctttcctacgggcaaacgctgacgtcttcgcatggagaccggcggatatgcccggggtccccagggaggtgattgagcaccgtcttgctgtacggccgggcgcgaggccggtccggcagaaagtgcggcgccaggccccggaacgtcaagccttcatccgcgaggaggtggcgcgacttctggaggccggattcatccgcgaggtcatccatccggagtggctggcgaacccggtggtcgttcccaaggcgaacggcaagcttcggatgtgcatcgactacaccgaccttaacaaggcatgtcctaaggatccttaccccctacctggcgcgccagatgacggagcgtggggctcctcaccgggagaccgcgctggcccccctttgccggttcggccggggactctgggtgagactctaagctcccaatctgtggaaggttcgcgagacaggaagcacacaagacgccggcgatgtatacaggttcgggccgctcagaagcgtaataccctactcctgtgttttggtggatttgtgtatgaaggaactacaaagtatgagccagcctctccctcgttctaggttcccaatctggaaaagtctcctcctccctctaagtgggcaaggtcctccttttttatcttaaggggataccacatgcacccttttcataaatggacggagatttgtatagttgccatccgagtcaccttctgatgggacggtccacaactacctccactttcgccgggagcagatgcgacgtggaatcgtggctgtctactgacgacatgaccggtgtcagaccagtcacgtcggtcattcttgtccaccacgtgtcagcttagcaatctatatgttcgtccttcttcacacaacatcttgcctgtaatggttaggatgaagcctggcatatatctgaccagggctaacgtgccatctctgggaggtaacacgctagctccagctggggacaagcgcctagaagccctcgtcctgacgggatggggcgaggcgtgcgtcagatcgcctgtcgccacctaacccgcgatctgaccggtctgtgactggtcacagaccggataaatgagtgcactgcactgcgttacatgcagcgtgacacgctcagccaaaccgcaataaatgtggttaggtgagccccgctgtgctcacctaacccatacacacagagcaaaaaatccacgaggggtcagggcgcctcggccctcggggctgaggcgggtgcggtccgaccccctcggggggactaagaggagggcgaacacattaccctcgggcccgacgtcccccgagggtgccaggccacgtgggcgattgtgtctgcctcaaacctctagtcatgatactcctgatcccatgtcaccgacactcataaccttcagttacaatctccatccattttggtgaactaatagacatgaccagcacctcttcatcctcaactttcctggaaagagcatctgccacctgattatctaccccttttttgtatcgaatcttgtactgcaagcccattaatttgacaaaagctttatgctgcattgatgtgttcaactgctgctctcccagatgtgttaggcttttgtgatcagtttgaatcacaaatgcagagtgcagtaaatatggtctccatttattgactgccaacaatattgccaaacattccttttcataagttgacatggcttgcgctttgacccccaatgctttactaatgaaagccaatggatgaccttgctgcataagcactgcccctatccccttgtcactagcatcaatttccaccacaaattcctgagagaaatctggaagtgctagaactggagctgtggttaaagccttcttgacagactcaaatgcttgctgatgggtttcctcccaaacaaacttgacttcttttttaagcagatttgtaagaggttttgtcatcaggccataaccttgaatgaactttctataataccctgccagaccaaggaatcccctgagttgtttcaaattcttaggaacttgccacatttgtacagccttcagtttctaaggatcagtagccacacctctgaccccaattatgtggcccagatactccaattcctgttgtgcaaaagagcatttacttgccttcataaagagttgatgctgtcttagcagagtgaacacccatctcaaatgctccacatgttcagagagagtcctgctatagattagaatgtcatccacaaatactagcacaaactttctgatggcagcagtgaatatggtgttcattaacccctgaaaggttgctggtgcatttgtaagcccaaatggcatcaccctgaactcatatagaccttgatgagtcctgaaggcagtcttatgttcatcttgttcagccaaccttatctgatggtatcctgaccttagatccagtttagtgaaccatttagcccctgctagttcatctagcaactcatcaaccactggcattggatatttattctttactgttatgtcattgagccccctataatccacacaaaacctccaagagccattcttcttctttaccagcaacattgggaagcaaaaggactagaactggcctgaataattccctgctgtagcatctgtacaacttgttgttctatctcatccttctgctgaggggcatacctataaggtttcttagtaaccgatttagctgttggaagcagtggtatgtgatggtgaaactggcggtgtggaggcagctcagttggtttcttgaacctatcttgaaactccttcactacaagctcaactgctgctggtaactcttgcttaatatcaggaacttcctctattgcacaaagttgcaccatctgtgatattgccccatctttatgcaagcccttcaactgcttaacagatagcattgtggtctgggagaggtttggtttaactccatttagtgacaccctatctcccatatatgtgaatctgatcctcttccttctccaatctatccacatgggactgaatgattctaaccattccatacccagaatcatgtcatatccccccaaattcagtaccttaaaatcaatggtgaaagtatgcccctgacaccaccattccacaccagatacaagctgattgcactgcattttcccaccatcagcaatggtcacctgagttgctggcacagtttcacactgaagtcccaacttgttcaccacattctctgctaaaaagttgctggaactacctgaatctagcagtatcagcagttgttgtttctgtatcatcccatgaaatcgaatcgtcttccttcccatggttccagccacagcaaactcagacaaaactagctcttcatcacttttatgttcttcttcatcatcaccttgggaaccatcctcctgcaattggagcacttcaagcaattcttccaaaacatgtaattgtacagacttaggacacttgtgccctaggccatacttttctccacacttgaagcactctcccctagctctccttgctgccttcagtgtgtcaaatctttcctcccacttgggtttctcctcaggcttcttagcctcctctggtgatgctcccagaatccctttgccttgataaacaggtttaatcaccggcttgtaagcatccttgtatccttctttggagtagttcttcctgctactctccagcaataattcctcctgcgtttttgccaaagataatgtcagatcaaccgttcttggtttgtgtaactttatagttgttttgatctcagtttttaaaccccccatgaatctagtaacaaaaaatgtctcatcatatctcttgttgtaaactaagaccctatgcatcaactcctcaaatttagtataatactcatcaactcccccaacttgactcaacccttctaactcctctaaatgttgttggtacttgtccttaccaaacttcccatgcactactacacacaattctggccagctctctacacagtgcaactcctcataggtttgtaaccataacgctgcattccctacaaagtggagtgtggcaaaggatgaccaagtttcataaggaacctggtacatactgaaatacttctcactattagttttccatagctttgggttgtctccatcaaattttgggaaatcagttttgggtaacctagatccactagaccttccaggactctgcaatcctcccatccctttttcagagcaatcccccaaatcaaaatgaactggcgagttgtgaaattgcagcttacccttgaccagggcgcgcccctggtccactggggtaccagttgcagctccctggtggttcaaagctgcgccgtgcccaacgggcggaatagtcaccggcatagttgtcgccggcgcctttgcctccagcgtggtcacccgcgaggcaacttgttctacagcttgacgcaggtccttgatgccttcatccaccgccggaatccacttctccataccttgtagggatcccaggatggagttgaggcttgtggtgagctccgccaccctcgtcgtcagcgattcaacctctccttccaccgccgccatgcgctccgtcaaggttggattcgccttcttccttgccaagctgccctaaaatccactgctctgataccagatttgtcacgaatcagtgagatctcccttggcgaaacgccaaactaggcacggatcgagcaactcgggaggaagaaaagaggaactgagcaagaacagagtggggaattgacttggagaggaggttggtgatattgtattttcttattcgttgcctacgaccagcgcttcggcaaagtatataaaggttccagctagtacacagctcacagctgggccttcactcacgcaccagccaccttacaaggccatcaggcccaaatcccaaatagaatagtgaagccaagcaataaaagactcctgaagtctaacacagcaatgttagcaagatgctccagcctccaggtatattaaatcaaacttcttcttacccaacatacatatatgtgtatatgtccattggcattgcatggcctatgcacgaacacgtataaggtcgtcatcaatggcggcgcccacgccaccgtgcatgcatgcttgcgtctgatgcgtgtttccaatgcaggagctgctggcgcggcagcaaggcgacgcggtgagcagcctggtgtatgaggcgaacgaccggatgcgggacccagtctacggctgcgtcggggccatctccttcatgcagaaccaggtgtcacagctacagatgcagctcgccgtcgcacagggcgagatcctctgcatccaaatgcagcaccgcgatggcaatgagaacaagaagaatgtgagagaggaggaagagagagaagatggaaaaaaagagagaaggtgctgacgtggacactgacatgtggggcccatatggggacccatactgactcagctgccacgttagacaaaaccggggtcaaaactaccgaaggatctaaagtgaatggttttgtaagttgaaggatgtcatatatttggttttgcggttggggatgattttgtatctcgatgacaagttgagggaccttgggtgtacttttttcgcgagttgtgggccctctcgtagcgttgcaggccaagctgaacgttttggtgggctccagtttataatgggccgtaatcacttttgggcctccatctggcctattggcatttgacgtcagattcggccctgtcggttgccatgtgctgcacaacagctccattagttttttttgacgaatcggcacaacagctccatcagtagtatagatggccatgtgggccgcccggcacggcacggcccaggcccggccgtgcctgggccgaggcttgtcgggccggcacggcccgaccgacgcaccgggccgtgccgtgccagcccacgtgccgcactcacagcccaggcacggcccaacacgcctcgggccgtgccgggccggcccgaaggcacgatgggccatcgtgcttttcctcagaataagtctaaattttctccctcctattgggctgtgacattgtatagctaaaaaaagtctattttacctccctcttctttgtgctgtggtatataaatagctaaaataagtctatttaaggtccctattctttagacattgacatttatatgtctatttttagtccctatactttgtgtaccgggcctggcctgccagcccatcgtgccgggtcggcccgaccgtgccgggccagcccagcgtgctggtggggaggcccaggcacgacccgacagtcgggccgggccggcacgggcccgacccaagtcgggccgtgccgtgcttgggccgggccaaaaaggcgtgccgtgggccgggccttcgggcctcgggccttatggccaactataatcagtagcttaccttagctgtactcttttcggtcttcagtcttcagggagaacatcggctctaggtcgtcaacacacttccgtgtttccggaagaacacaataggtgtaaccgtgtaagagcaagtttaatagtgtagccaaatactatctctaattcatctatagccaatctagtagtttattcatacaatatttacatactacactattaatatctagtcccacctatcataaacacactgcgttttggagtccgtgctataactggctacaaatttgtagcccgctgctcttctctctccttatttatctctttaaaatatctttgcagctggcttatatcctgctattgtacctgctctaagagcaaagtatatactactaatcagcagcttaaaacgtactcctactcagtgctgcatgtactcaaatgccattagactcaaaaagtccaaaagtaaaccatccccttttctttaattatacgcacaccttgtggctcgtgctccaaacaaaacgtgctactcctgcttttcactcatcggcccaacacggacacaaaaaggcaaaaacgacatggcgccacgccactcacccacacggccgtcagtcccagcccccagtccaccacacgtgtccccttcactcacgccccctttcccctccatgcgaagccgtgtctccttcacacacacacacacgcacgcacggtcgcggtcgtaggtgagcggccgcgcatgccacgccccgtccgccctcgtgccgagccgcgagattccgcagggcgcaccggcgcacgtacgaccaactccgtctcccgtggtagcctcggcatgagaatacgattatttcctcgcaatctcgcatcgcgcacgcgcgcgcgccatgtgttcggctccggccgtttcgccggctcacggcgtacctaaccgcgcgcgcgcggccaccatcgatcgatcgcgactttgcggatcgcgcgagcccccgtgcctgcgttgcgtgcggctcgatcgatcggcaggtgcgtggcatgcggtacgtgtggctctcctgtgacctcaagctcaacggtttgactaatcgatccaagactctaatttatgtacggacggatttttccatcgatctgcttgaaaaaagttctggaatgcatgcattgtacgtcaagagggagattgtcaaggatatgatctgacgtgtgttcttgctgtggtgttacgtgttaacgttcgttgagctgaatatatgtatgcatgaaaactgaatcgagaggacagcaacacgaaaatatttgggttgttggtcgggacaaagacgtacacaccagctggatatcagagtatccacgcacatcatttcatagtatttcaatagatatactagctcttcgctgatacgcacacagtttattattcaagttcatggggtcacaagaatcaaactgtctgcagcaactggcctcatgccggtacgaacaaactccatccacctccccatataccgtgtgccgagagatctcctgacagatccgtcatgccagtacatttgttaatggctcttttgagtttttaactagccctgccaaactcctgccaactcgcatgtttatggttaactgctgcgcttaacccctacaagtccactcactctgctggacgaaacatcactattctatacgtaatctctacgcagttacgtagaactgagcagggcgcacgcacggacgcatgcccactaattaattcactcatgtctactagtagtaacactgtcagcagctgctgtttgatctgcttggtcgatgacccaaccaatcacgcggcgaaatttggcgtgcaggctggccacccgtttcacattttacacggacacgtcacactgccccccctggcttcactggctgtttgcttgtccgtaccggcttcacatcgcgtgttaattagtggagtagcagcttaattaagctactccccgcgcatgtcgctctcgcgaaaaggctcgattcaaacctaccttcctgcctcgttcctctcccccgacacccgcgcgcgagagctatatataccccagtttgcttcgcttgctgccacttgaccagcagcagcagcggcagccggcagcggcagcatcaagcagagtatagctcgcgatccaggaggccgtacagaatcgatcgcaattcacacacgcacgtaaaggagatcgaagattcgaagagagatggagggttgtgcgtcttcgccggagagctacgtgaggatagggaggaggtggcggaggcggcggccgccggcgagggggttccggctgtgcccgaggaaccggttctcggtgcggcggctgcgggccaagctgctcacgttcctcggcctcgtcggccggtacgtgcgccagctgctggcggtgaggcggccgcggtcgtcgtcgtcgtcttcgtcgtcggctggaggcggctgctcacggagcagcagcacgaggttcctcgtcggcggcgggaagcatcacgtcgacggcgggcggcggacagtgccgccgtcgttcatgcggtccaactcgttctacgcgcaggcgatcgccgactgcctcgagttcatcaagcggaactcagtcccggtcgaggactacgccagctccagcggcaggagatcatcggtagacctgacaacaatctgatcaaagtctggaatggctgcaattttttttggaacaaagatacagattagttaaaaggttgtaaatgtgtgcttcgaatgaagtctaaattaagatgtgaaactagtttttggattgacgacactcatgtcttaatacacatgaggatgtaattaacagggcgtgaaatgtgagccgcataatctgaatttttttgccatgctcattggttcaagatagatattaacacttgttttccaactgccatctgtattagagtagaccttaattttgtgtgacaaaatttttcttccacgaacggccgtctagccgtccaggtccatgggattttattcgatagaaaaggacggggcaagaataatacaactgaatattcaaatacgtgttaacgtttcagactgttacagatatactttccatgcagcgatttccttcaaaaaaaaaaaactttccatgcagcgtgcatgctctctctttttttaatggtgcatgccaatttctttgttctgccgtgtgagtgtactccattttcttctgctgaaagtaagtgtcgatggagagtcagtttgacgatatctgtctttttttttggcaaaaaaattaatgcatgcccaaatggatggggttaatttctcaccaattacagaaagtcagaaacacatagctagtctggccaaacaaatctttgcgtctcacctgttactgatttttcttatcggcttaatttgtttgtcactagctgttctgtggacaatgctggtttatctttgtcaactagttagtgaaagcacgggagcagcggacagccggacaccgacactgctatcgatcaggtttttctttgtctgaaagtgccattgcatcatcctgaaagaactgcatttaaaattttcaatgatgtagcgtgaataaatggtaaaaatgctgaagctgagacaaggctgggtcattagccaaaagcccacgggtagtagtagaaaagcccgttgctacaattagtatcgtggatttggtcgagagaaaaatctgctcatgggccagcggctagtgttgtttattctggtccgtttgaacgaaacgctgcctctgaattttttgtttacagcaaagggatcgaaagcgagatttgatcggctgcatgaacaaaaaggattaaagcagtgggcagtcggcagcatgttcctgtgctcgtgtctctcctgcctgaatcctgaaaagctcgacaggtaatgcagcaatggaggaggacatcatcatcaattcatcatcattagaacgaccaaatccaaataaacatggcgcacgtactggccattatcttaacgaaactgcacggagagtggaagtagtgatgggaagagagtgattcactttggctgtgtcacgcagcggaagtttcgatcgatctgtttgggtttccatccgaaagataaaagatggaagccactatttctcgccatcatctgaatgaagcccttctttttttggcgggcctcatctgaatgaagctggtcggaaggagcaagatttgcagatccacgtatgtgcaaatcgcaccacgaatcctaatactccgacatgattttgcttgtgtcgtcacaccacaaactctatttttgagcttagtttgttaacatcacttgatcgctctcgcttgcgatctgtgaatctagtgcgtgcatactgtgcagttgaaaagtttgccgtcaagtgagcgtagctcaaatccaactcagatcgaagttataaagttgacacatatgctcgcttttacggttaattattctttcaacagtagacaatatagccgttgatagtaatgcactcgcaacaacttcatgaaactcaagatatgttaatccagatttctaaatgtgctaatagagataaaatgtgtgttcatatggagatatatcagttcagtttttttggaggtgtttataggagtacggcgcgtttaaaagtgtggtatgcatcgtgttgtgagtgtttgtgtgtttctttaaaaaaaaattgccatttgtcaattattgtggattttctgcaacttgttgtccaaagaaaaagaaaatagtttcggtcaacaactcaacatccatctgggggtatgaccgaccgagcgcggtggccgttgattggctcgtcgcctcctcccttctcggtctgacggtctgaccagtgccgggtaggaagcgtaattttgaggagagactccgacccgcgccgccgccgccgcagccaagccatggagggatccgccggggcgccgctccgcacgcgcgtgtgcatcatcgggagcgggccgtcggcgcacacggcggcgatctacgccgcccgcgcggagctcaagcccgtgctcttcgagggctggctcgccaacgacatcgcggcggggggccagctcaccaccaccaccgacgtcgagaacttcccggggttccccgaggggatcctcggcggcgagctcatggatcggtgccgcgcccagtccctccggttcggcaccagcatcatctccgagaccgtcaccgcggtcgacttctccgcccgccccttccgcgtcgcctccgactccaccaccgtgctcgccgacgccgtcgtcgtcgccaccggcgccgtcgcccggcgactccacttcgccggctccgacgcctactggaaccgcggcatctccgcctgcgccgtctgcgacggggccgccccaatcttcaggaacaaacccatcgccgtcatcggcggcggcgactccgccatggaggagtccaacttcctcaccaagtacggctcccatgtgtacatcatccaccgccgcaacaccttccgcgcctccaagatcatgcaggccagggcgttgtcaaaccccaagatccaggttttctgggactctgaggtcgtcgaggcctacggcggcgagggtggaggtccattggctggtgtcaaggtgaagaacttggttactgggaagatctccgaccttcaggtgtccggtctcttcttcgccatcggacatgaaccggcgacgaagtttctcggcgggcagcttgagctcgatgctgatgggtatgtggccaccaagccaggctccacgcacaccagtgtgaagggggtctttgctgctggggatgtgcaggacaagaagtatcgccaggctattactgccgctggatcaggtttgtgaattgatgatttttcaggttacctgtgattaatttttttctgcactttcttagagatcagtcgcttcatgggttgctatttgctagtgcgaattgcaatagaaattgttcagggcttgagtatgtagtgagcgaatgatgatggtcaaaattagaacctttttaagctatcatagagttaacgtgtttgagtttctgaaataagtgctttcattatgtatctagcatagttgattagatatactaactaccttttgggcatgttgaatgcgtgctctgtttccaagctaggattgggtgtattagtcctaaaaaaagttaggtgtatttgaggccggttaatgcttccaaagtaccatgtaggttcatatgtttgactaataagtagctggtagttaatcatggaatttgttgaactgggataagtgactttcaagctattctgggattttcatagttaaggcattccaaatattgttaggaataaaaaaaagtgctacttcccatttagtatagaagagtgcatttcaatttctacactacaaagtacggactgtatttttgcaaaaaaatcaaaaacagaagtatggtcagtacatcactctgtcactcctgtgatgtgagttaactttgttaagcgtttacatgctaactgatgttgcagcaagtatttttactagagtgcaagttacattttcatgtggttagagggcacatgcaaaattctccatgctcaaacttcaataattggtcatgtttcgccattctcccttcttgatcctgtcagagatggagtttgaacttattattgcataaaagaatgaattggaataaacagagactgggttcactttccctgcgtgctgtgaacatgtgttccggatgggcataaacaaagtaaactaatatgttaccaagtatggacttgctgaaataaattgacctttttgatggacaacatagtggaggaataagcagagactgggttcactttccatgcatgctctgtaaacttgagttccggatggtcataaacaaagtactccctcgatccctaaatgtttgacgccgttgacttttttaaacatgtttgaccgttcgtcttattcaaaaaatttaagtaattattaattcttttcctatcatttgattcattgttaaatatacttttatatatacatatagttttacatatttaacaaaagtttttgaataagatgaacggtcaaacatgttgtaaaaagttaacggcgtcaaacatttagggaaggagggagtaataatgttaccaagtatggtcttggtcagaaacaatccaaattggcatttttgatggacacagtcataggagactgattttaatcctgatgtctggttgtttagcaaaaattggaatcagggaataaggccagtactgctgatgtagaatgaaagcagtatgccatttctatatacttcagaaagaactaccttgttacctgtcgtgtgaaaggaaaaagcctgatgataagattttcatctcagaagcagcatacagagtttttcctttgtgattttcatgttggttgatacatggtcagtatggttagtacatgatgaagccttattattattactattattttgtgctagcttgtttcaggagtttgatccaatagacatgcacttcaaaaaaagagagaaattgtctatatgcatgactctgtcgacaagatcaattctaactcatcattgatggctactgctgagcataaaatttttgtggcagacttctaactcatcattgtatccagggtgcatggctgctttggacgcggagcactatctgcaggaggtcggtgcacaggagggcaaggccgattgactatctcaggaggaagcgaccaccagcgtttcaagaagtccaacgttgtcgctgctgaaagctacactctgaacgtttatgccatgggctgttctgacttctgaatgcttctaccggattttcctgccccttattagcgtcgtattatttgatgtgctggagatttatctgtatttacgctgaagacgacgtattgcttgcgggtatccgcattttctgcatttgcttatgattgagttattgtgacatttggcgtttttagtaccaaactagcaaggaattgtgtattctgaagaccattccgatcaatgctactgatatggtggatatcactattgttttcctggaaagaggagtaattagaagttcactagcaggttgctaaccctgagagaatacagagacatgtatgtagcggtgtacacctacttgcccagccagcctatgttacaggggctcgcaggcagggcgcccagcccatatcatatcgcggcctctaggttattgccgggctatgtgaagtctcagcagtgacaacgagaactttatctgttactactaggttaaagccacgtacttattctttacgtgttttggtgaggcgtaccgcacctgcaacgttaactctgcgacatatattgatgctatgtggtgtttgcgacatacttcccctttttcatattataagactttttaacattgcccacattcatatagatgttaatgaatatatatgtatatgtatatgtatatatatatatatgtatatatatatgtatatgtatatatgtatatatatatatgtatgtctagatttataaatatttatataaatatggataatactagaaagttttataatataaaatggagggattatattgatgctacgtggtgtttgctcataacatagcacgcacgagaggcatactggcatagctccacgtcttggcacggcaagcaccgcggaccgcgcgcggtaagacgaccacggctgcagctggccgctgcaccccgcgccgacatgctttgcagtcgaggcatctgcggccaccgccacggcatgttgccgccgcgcggaagccggcgcggcgcaacgtaccatggtgggtctcacctggctgcagctgtgtacaaatctctccttccctttctcctcccaccctcctctcgttgccggcaatggggctcctccatgtcgatgcaacgtgcgaggaatcggccgctagatcaccagctgcaaagcaatcggcaaactcgcgttcggccagacatggagaggatgcagtcgatctcagcgtttacggcattcttcagatgcatctagctcccctttgttacggcggattttgaccgtgttgaccgacagtaaacacgattggctattaatggaaaaccgacggcgatgacatttctttaggaaagatggatacctccataccctaatagaagagatattcactttttcttttaacatttaaccacacgttttattaaaaaaattatacaaatataaaataaaaagttatatttaaaatactttggataataaaggataataaagtaagtcacaaataaaataaataataattttaattttttttgaataagacgaatgatcaaataatacaagcaagatgttaaaataccttatattaggggacagagggagtacaatggtatggtattttttagacgctcgccgatgacatttattagagcttaaaaaggaagtatgaaaaaaaaaattgataacttagtacgcggctttgagcccttaatacaacagttttgcatagtgattagcccttaatacagttgggaaatggatcgtagcaagcgaatgtgtccccagagcaattctgttcctcagtgcctgtctctgtttcttggtcgacgggtacctcaagggccttggattcttgcccttgcacttttcacacgccatcctcttatacaggaatatatcctcaaggttcaccgctgcatccatgacaagtctgatatacctaatcaagttttcgtcgttcgactgaaagccaaacatgactaacgttgacaggctgtggttcttgaaatctgacgcagacgcattccaatccgcgttcttattctcgctgtatgagtaggctttcctcctctcatcatccgtctctatttcgcagagatgatcccatacctgcaggccgcaaaacatatctcagaaattgcagtcaatgcaaaatgtaaaacagtggcgtagttaaaatttaaattaaaagtagtccatctatatgtaatatgtcaattaaaagggtggtccactatacaatttttactatattaaccagcacatatactataatttcaaatttttagatggtccgtgaaccacggtgccacctagctggctacgcccctgatgtaaaaggcttagcagataatcaagcatcagttgcaggtgcttaccgccacgtatagctccctcaaggagggtgcagcctcaagaaagaacattgtccacgagggatcatacccttcaggaagatcaactaaattcacaacccttagtttgtggaatgcagatgcaagtgcttttgggccttctggttgaacccaaatatgcaacaaggaaaagaacacatgagtacatgacatggtacaaacatacaagtaaagccatcagagcagaagaataatcctttttagatggaactataagaataacattgatataccttttcactattaaaatctaaagtcagatctcttatagagatattgctcagaaattcgctcaacttcaccgcattgtgccaactaagaccaacattggtgagggttacagactccagtaatggaacatgtccaaaagaaagtggatcttggaaagctatccaaccaccaaagatcatccgtgtgagttttgggagtgaactaagtttgattattccaaaacggcaattaataatactaagttcactgagttgcaagtgttcaacttccaaaaaagtggaaattcctgagctgcagttatacaaacgcaaatagtttaatcgcttgcaagtgttgaggacatcaatgatttctggttcaccaaatctcaaattctcaagttggagtcctgtgagacctccgaatgtatttggacaataactgaagaacaacgcaaaacgtctcccatagacgatgaaatcatcgtcaatgcactgattgtcatctttctctgtcaaaattgtaaattcaatcatctcaactttttgggttgccataacgtggccaacagtgtgtccaaaggatatgcagtcatcgtctctcaagtagaatctcatggataggaggctgatagtgtgctcatttgacttcctgcatgccaatatgctcttcgttgccttaaccactgttgcattgatccgacccagttcatcatcagagaagctggacatgctcttgggatcaaagtcagaaacatctattgtaagatgtgatatcatagtggggagtggcctccaacgctttgagaggaggcttgttcttgcagcatctcggacattgagtccatcaaggatggctagcaaaatatcatctggcaactggctaatcctgtcttgtaggtcagcattctgcatttggtgcgaaaacattaagcaaacttaaagatgaaatctgaaataccgaccacagtcaaagaagggaactatatgaccgcagaaaaattcgaaggaaaagttggaggattcatggacgggggagggggaagaatgacgtagatttacaaaataaaacgcttacggaagtaatgtggtcttgcttgatggttggtgtagtttcaatgggcgctaacacgcttagataccctcccttgttagccattgcagattgatgataaaccgaataaaacaggtcaccggacctgaaaaacgacacgtttcattgattgaaattggattgtgtctttccgtattcaaaacgaaattaagtaaatactatactttgtcaatttaggtgggaaaaccggaggtatgtgattccaaatagatcgctcaggagacctcaatcagcaattcagcatacagaaaaaaaaacagagagatacttaccgccgacgagaggcagcaattaggtagaagagagagtgaaaattaaaaaaacaggcgccggatacgttggattgatcttaaacgattctaccttgcctcgattcaactgaatcaaatcgataatgtcgaaatttgggttggagactgttactcggtactagcagaggtagagggacagatggcctgatttagcttggagaggtggtcggcgaccaggtacaaaggccccgatttagcttagagagggaaggagggaaggtggcggactagcggcggcgagtagcggccgtcggcgaccggagagagcaagacgatcgttctggcacactcacatctaaacaaatttatgaggcaaaatttcctgcaggtattacctcgccaaattggaagttcacctggagcagcagagcactgttgaaggtaaaactgtttgcttggctgctggttcgaaatagactgtccacaatgaaaaatctcttgaagaagaagattgttcagtcagcgtcttgcgtgatctgcaacagtggcgacgagacggcaaaccatttgtgcttcacttgcccttttgtggtcagtttctggacaaatattggagtgcaaccctcaatccaagaccttcagttcttctaccggctaagtcacacgcagcttctgccggcaaagcactgccatgtcttctacctcctctgcttttgggtgctatggaatcataggcatgatgtggttttcagggggcaacaaccttctgtagctgcatgccttcaacgagggataagcgaggcaggtttttggggacaaacactagcggtgcagaatagatccgtaatagatgattggaaacacattttctcttcctgtctacaaactctaaatccattgtaacaaaactatttttctcccttttatgcaatgacaattcagatgtttagtcaaaaaaaaaagaaaagaaaaaagctcggccctagggttggtaaagcaacgaagccctctaccattcaccccatgggccatgggcacaaaatctgttgtccctattatggaccggtttcgctcgatttttttatttttatattactagcaatagtgcccgtgcgttgcaacgggaaaaacgccgtttgatagtgtcaccctaaaaacctcaaatttgtaaaaatcaagtataatttgatatattaacaaataggtagaaccgagtctaatttgatcaattagcataggatttaggatttagttttagatttatttttcaagcctacttaagagtttatccgacggactttaatttgaaaaatgtgagccacattgtttgatcaaatttgctttcggcccaggtcttcccaagccagcccaaacttgggctggcccatcttcggcgagttgagtccattcgatggcccgcaagctgagcagctgagcgcggcccacatatgcggggacggtccgatgcacttccgtggcccattaggcgcagcgtaatcaacggcgacgacggcccgacactgggcgaatctgagccgtctgatctgatggacggctccaatcgtccccgcgccggatgaagcgccgaccgaggagaggggcaaaaccctagctcccaaatccctctctcctgatcccatttctctccggcgacgagagagcggaacgacagtggtccggcaagctggtgcgcgcgtgcagcgatgaccgctgagtggctcctgcttcgccggctggggggcgcacacgagggcgcgcaaagccatgccatgacgtcagcggtccggcaaggtgggcgtgcaaacggcgacaagcgccgagcggcctgacctcatcggcggtaggggcgacgccaagccgacgcttcccgtcttcggcaaaggacggtggaggggtgctccaggacagcgcgcatgcagggaacccgacacgactgcgaggaggtgaaggtgcggcagtgccacttcccggaaagctccaatgagctcaggggcttcaagtccggtaagtaacccggacccttggcttaattgatttggatttgactcttatggttcttacccgaaattagggttcttcgaatttagagaattttgtcgggaaatttcaatatattttattccctcttttcgagttaggggagtttcaatatcgtttatcctcttttaattttgggaacttcaatctagtttatccctctgcttaattttgttttttttctttggctggtgtttcatcgcgcgggcggggatggagggtgctgctcgtccccttggaaagattgagattaagataagataagatttttacggacaatggaagtaaattgaatcgaactttcttttttctgttttaatgtttttttcgcccttctttcgttattacggacaacggaaacgtttttaatttttttaagtagtagagatagagaaaatagagatatagtaccatgtcaaatataataggattcgatttttttactgcaccacatataattctttttttttagatttgttttttttttctcttttttttaccgcatccacgcggattcgttttttttggccggtctttttttcacctggttttttttgcgccccttttttaaggaatcggacagattccttttttatttcttttctcccttttttttaccacggaatcggattcgtttttcctttcttttttttgcccttttttgatgggacagatttggtttttcttttcttttttgcccgttttttgtccggtttttttagcccgttttgttttggatcggatggattttttcgtctggtttttttttacggacgatggaagcacatcttattttttaagtagtagagatagagatagagattttgttgaaatatttaaaaaataaatttttgttttgaaaatttacaaatttagaggtctcacgtcctttaaaaaaaaagcccttccagagagatctaaatgtaatttattttatttgtatccaaattcttttcactggttttaattgttttatttaagaaatactaatgcttatttgatactccaaatgatttgaaatgaaaaggtaatacactacaaagttgtagatctcaatgatatcaataactcttctataaagtttattttcatctgaagtgatatcatagtattttttttattatttgtggcactatctttaagctacttgcgtcaccacgccacaactaatctaaattatagcaatgttatgcattaaacaaacatccccttcacgataccatacaaagcacgccgcgccgcgctgtcataaacaagacaacagcaacactagcaaagaagaagaagggaaggtagtaccaacttaccgggttgacgattggcgtccacgggaagaagcgaaggacccgactagagatggcaatgggtacccggtccccggtcccccgtggagaattctcccattatgtgatggtgatggtatcaattgtgtctccatggggaatcaaatggagagaaagtagtctccgtcgggtctggcgggggcgggtttagttcaccgtcccccgtccccgccctccgtggaggcccgatataaaagtatgtgtgtagtaatatcctgtgcatttggcccatatggcccataaaaaccaggcccaaagcatagagtatataaagcagttgtgtaaccctaaccattccaatccttatccccttcgtccccattccccagtccacacgccaccgtccgccccgctcgtcccaatccccacgccgccacgcgccacgccaccgtccgtcggccacagcggctaagcggcgccgactcccgatctcgcacccgcacgcgcagggccgccgcgcccgccgtgccggcgaccgcgccagcgccgggccgccgcgcccgccgtgtcggtgaccgcaccagcgccgagccgcccggtcccaggtggcccagctcccagctcccgagccccgtggccaggtcccagcgccacgccgcgccgtcccgttcccttcactcgcagcctcccaggtccgaggacgccgtggactcggcaccggccaccggacgtcggcctcctcctccaccctctgtcaatatctgatccgtcatgtaggcttatttgttttgctgatggtggatgtaggtgaaggcttcggtggcaagaaaggggaaaacgacgagtccacacgacgaccagccgctcgagtccaccatggcttcgccttcaccactgctaagctccgacgacgatgcaaggtgagcacatctagctgtcctactcccaactcagtacccctccctagacgcctaactacagtaccatatccccctccccctccactaaattcctcttccatggctacatcgttgtctcgttgagtcactaactcacgttcggcgatccacaataagggacgccaatgcggagttggaccagccatcgcatgctataagcgctgcagctgcagccacacctgccgttgtgcctgttgctggatctgccattgttcatgtgggcagatctggttcctccaactccggtgcaaaggcctgcagtcggccgccgcaaccacctataaaaaggaccaccactaggcaaaaagccatcttgcaggagcaccttctgcttcgactaaggcaggagctccttctgctccaagaactccagaagcttcatcttccaccaacggcgtgcgcttattcaaatccatggggttcgatttcacgctaaccctttatatattgtagcttcacttttgtaatcctaagttcctaacaatttagcatgtgcaatttattaatttgcagcttgcttgattttcttagatattgaatgttgtatttagagtatctgtagaaaattagatatctttacatgtatattgtatggttgtacattgaatgttgttaagttataaatatgttatgaacttaagtttttgaaattaaaggaatctgaatctgtgtagtgtagctcataaaaattttattattctataggctgtagcagatttcagtatgctttatgtgtagagattcttcatttcaagttttccaagattattctataggctgaaagatatattgatctatatttatttgtcaattgtcagatttaccacgaattcaactgctggtactggttgtgggagtagcagccagcaagaatcacaatcacttccaccacaagcagagtctgttaatgattctgagccaatacaagttgaagatgatgagccagaagatgattctgagaattttggcacaaagaggaagcttacttctgttgtttggaaggatttcaagaaagtcaaagtctgtggtgatgtcaagactgaatgccttcattgccacaagcggcttggagggaagagcagcaatgggacttcacatctacatgaccatttgaaaatttgcacattgagaaagatcaagatggggccaaagacacttgcacaatcttcattgaggttcaatattacatgagtatcctttatctattgttgaccatattggctttcgaagatttgtgctcctagtgaagaagaatgggcttttgctagtgaggtagttgataggctcaagttgtttaatgacatcactgcagtattttctggcacaaattatgtgacttccaatattcaactacttaaaatctgtaggctaaagagcaaattaggaagtgggctgtttgtggtgattctactatagaggaaatgtcagttgaaatgattcaaaagtttgataagtactggaaagatattcaagggccaatggggttggccaccattcttgatcctaggtttaagattgactatctccttgggttcattgaaaccatcactggtcagtcaagtgaagagtgtgcaacgaaagttgctgaggtgaaagacactctatatgatttgatggagtatgaagtggaagatgatgaggataacacggaatcttcagctcctccacttgtcaattctgatttattgtcttcaatcacagcacgtgttactagtaggacaccagcagcaatacgcgttaaatcagagctagacaggtacctagaggatgagttggtttcaattaatacagaaaactttaagattcttgattggtggaaagtggttgggacaagctttcctacattgaggaaggtagcacgagatatatttgctattcctgttagcactgttgcatctgaatctgcatttagcacaagtggaagggttcttagtgagcatcgtagccggcttacttcagaactcttggaggccttaatgtgctcacaagattggctgcaaaacaagtatcgaggtacatatgctgttttattcatacatcatgcttagcatagattttacaatgcaatggatgcaaaataattcttataattgttatcttgtagctgataacgaagaagcagcaagcttttggagttgccttcaagatatccaagatcggattgagctattctttcaacaacttaaaattagcaatcaaactcctaccgccattatttgttatatccttataaaatctatatacctaattaaaaaatatgtaaggattctgggcgtttttttcgtctgtcccacacgtgtagctaaatccgttttaatctgattaatagacggatcggacagttttcaatctactccaaaaccgaggtttatatactatatgtaagttccatgtaatctcgtagcacatatagtaatctgcctacatggttaacatcgaaagttttcatcccggcgaccagggttcgattcccaccttcctctcccgcattttttcacctattattgctagcactatgcctatgggctaatgggcccctcctagaataagtctactttccctccctcgtgtcaaatctcccgcattttttcacctattattgctggcactatgtctatgggcccatcctagaataagtctactttccttccctcgtgtcaaatcatattaccatgcacatcccattgctgaaaaataaaaagtattgcacctctttcttcaacagattgcttctgaaatcttataatgaaccattttttaattcgaaattattgattctgaaatcttataatgaaccattttttaattcgaaaagtaaagataatcatattatatacacaaaaatatatataaatatatgcttaccgatatataggatgtaatacatattcaagtatacaaaattaatgccctttctttccatgaaagaaacaaaaggttgctgcacatgcaaaggacccacggtcactttttatggtgttaatatgtacctaataataaaaaagtatgtaaggattcgtccgtccttacctaaattttttcatccgcaacatcctgtgtccaacactggccgtgccaaagaggcaagccgagcggatggagctagcgaacaaggctgagggttgaaaagaaatgaatgggactttcagcctaaaaccaaggagtattcaactaaaaaaaccgagcaagctggataatgtatatcaattttaaaatatttttacccgttgcaacgcacgggcattttttttctagtacttgactaattgaatatcttttgctacttctttaatttagggacttgctcttgtttgaagccatgaatgtatggacatgcactgttctcgcaatgattttggatgtttgtaacccctgttatgtgtcatgataaacttgtaaaccatggcaatgcttttggatatttggcacaaaagacctactccgactatggttttgtgtatgcctggacaacatgtgttgctgctgcaatgtggtgataactaatgagtgatgactgatgaatgatgaatgatcatgtattattgtgttgttgcttaatctgggaatatgatggatattgtattcttgggcacacttttgttgcactgcttgttgctgcactgttgttgtaagtgatgaattgatgatgtgcatttgtgaactgatgatgtgcatttgcgaatttgtgaacttgtgttcttgtagttgttgttgatgtgctgaaattgatggctagaattgttattttgagtgttaatcttttgtatctaaattattgtttgatatgagaaatgcatacatgttgactgttgagtaagttgatagcggggatggaggctccacggggataaattacccgcacggaggcggtgatggggaaagatgttgccccgttgcatttcacggtgatggtgatggggaaaattctccaccgcggaggcgggtatggtggagtaacctccgatggggaattccccgttaccatatctagacccgacgaaccggaggcaggccgcacgtataagaatataagatgccactcaaaattggaccctctgtgcaaaactgctgcagagaaaagcaggcactgtactgtatcttttacatccgggctgaccgaacaggaaagggattaggtaaaaaaaaattttgccgaaacatacacgtactcgatcggataggagttccgactccaaaatctaaacaaaattggtagttccatctagtagtgccttgcctagtttacagatgctttactacgttgttattagttagtagatttagtacaatcttaatggatggctctgtctctctccccctgtgcatgcacgcgcgcttttttttgagagaaaacaccaggacatgtttgcgcctgagaaaccctgtggacatttcacgaaccaaacgacctatgcagcctagccagcctaggaaaatgttcatttgagctccttcattttattgtcaagtttcaaaaccattcctgagccggaatacaagatataacacattcttaattatacaaaatcggatcacattggatctcaaaacagtattgctttcgatatcatccctgtacccactcccgtgcaggtaacgggtacccatacccatataattgactcataccatttatagttttgttctataattagctatttttgaaccgtaacccatcaataattcttctggcaacaatgctattaacattagcgctcaaagtcgagtaaaaaaaatctacaaccatattacataatcaagaaatcaaataataatttcatataactagaatagaacttaagataagaaagaagttttatgttactcatggatttaggcttaatctacaggttttttcaccctcgggttggtaggtacgagtagataaagaatagacccatacccatgtacctaataggtaagaattttcgcccgtcggtaaactcatgggtataagagttaaaacataattagcatataatagataattagcttctaatagagtaaaaaccagtcaggtgtcgggtcatagcaccctgttgccatctctagagtctagacatgtatgtaacagtgtacacctgcttgcggggctatcagaggcctctgcatggacatcttctcttcaccttcacggcccaactacctgtgcggcccagccagcctatgttacagggctcgcaggctgggtacgctcagcccagatcatatcgcggcctctactggctttagcccttggccaccggacaccggccggtgccccctacaaaatctaaccgaccggatttctgcgtgattgcgcagcgccggccggcggccgcccaccgtacaactataccaggcatcccggcgcggcgggcgcgtgcgagtgtgcgacgcatctcgtcgcggtagcggcaagctgcacggcggaaggcccggcgtacgttctgggggagggagtttccgtacctgcgcccgcagcgtacgcctgatcatctgggcgggcagcagtacacgcggtaagttcctactttcctcttccagtcttcctcttcttcccatcgtacgcctgatcatctgggcatgataaattttgtgtgctcactgggtaatggccgggtagctaggctacctgtacgtacgtgcgttgatatagcgttgctgaaattttagaccctacgaaacgtacctcaccctagtggaaaaaggggctttaatcctagttgggaaccccctatacaaccggaactataaatccgggtatctttaatcccagttggtaatggtggaagcagtccggttgatccctagtttttttctttttttttttgtttctttgctcaaattgatctgctccctatatatccccaaatcatccacaaatcatagcatcacagatctggaaagaaatgcatcacagattgaaaagaaatacatcagagatcacaaatacatcacatcacaaaatagaggggaaggggaggaacgggtgaggaagggaatgaaggggagaggaagggatggaggaggagatattaagaggggaggaaatcgagaggagacgcgcggataatatcgagatggtgcacggctcggggtactctttgctcccggttggtataaacaaccgggactaaagatctatttgtagtccccggttgtttataccaaccgggagtaaaaataatcggggtctgtcttgaactcaacaacttcttaaaccgagactaaaaatgatctactaaagatcaaaaagtacccctcaacttttaaactggaactaaagatactttttaatcccaggttttattagaaccagaactattgtggaatttgaccgatcgagcaaagatggtttctctaccagagtcatctggctcacattatccattacccagtgagtgcacaaaatttcttgttttgttagttttctaggaaatgattttttttaaaaaaaacaatgtccatgttacagttgggagctagctaacttagctggaagctaggttgcaccgagtgtcacgctaagatctacttcaccttcaatttatttcctcccctattcctattatgcctcctccataacaaatttatccatccaactccactcatcttgtcatcgcatataaagataaagaaaaattgtattggtttatctgtgcatgtattagaaccgcatgatgctaacaaatatatatctctatatacctaataaaaaaatacataataaaatatacataaggctaataaaaagatacataaggcttctcggtatttttccatccgtattatttcgccgatccccccgcttttttttcatctacttttttcatcgcagttttctcttcacatgtttttttgccattttttcagggtttttttcatccacttttttttacatcgcggtctttttggcacgcttttttttcatcccaatttttttacattacgttttttcgcatgcggtaaggattcgtttttttatcaactaggttttcttctgtcgtcgggctgaaccctagctcagccgccacgttgatctatccctctatgcgtttcctcctctaattgattgcaaaaattgattccccacaactccctcatcattttccccttgatttctccttaaaattcgtctttaattcaccggatttaatctcaatcactatttttattctgagttttgtggattgctccattttttaaaaaggaaaagaggagatcgagtggataaaaaccctcaactaacccatcgtgaaagattcgaccgaatttgatgggaggatcggctccggtatcgtacatgcacttccggaggttgaagacgatagggctgaaaaggaagaaaataatgggctttcggtccaaaaccaaataaggagtataatgtataggcgataaaaaatatttttacccattgcaacgcatgggcattttttctagtaaaagaaaagagactagcttcagcaaccatgaaatcccaagctagttcttagaagataagtcccccctatagtcttattctggatctgcccttgctactaagttcctttagtttctttcaaatttaatgtaccataatatagagaacaacatgtatatataggaccaaattaggaaaacttggcaatctgatgcttgactccaatgtgatttgacaaaggccttcttgacgaaagaagtcataagaggtgcatcatcaggtagaaaatcgagcaagatcttagtcttacattattgtcaatgtaccgggaacaaataacatagaaatgttaacaaaactctatataaattaacgggatcaaatcaggtgaaacagtacattatttagtatgatcatctctttaaaacataagctgattaaagccatgaaaattaaaaattaatccacatgattatcactaccacccattaccaagcaaataaacggccggcattatggtgaacaaacaataatatatagtggttttttaaccaccaagttaagtatttcattcatcacaaaaatattctgtttaaggcaaagttgcaaggtacagttatcattcataagatgaatgtaggttgaactattgccgactgcatattttaatcctgtttttgcatgttctgcatcgatattttatgtttaatctgaatactaggcctctagacaatagcaaatacagtttgctcgcttgctgcaagatttagttgtagatgacacaacatccaatgccactcaatggaattccacaagatttagttgtagtcttgtagatggcagcacccaactagagacaaggtgcatgctaatacaatttaccctaatatatatgcactgttattagcacttagctagtactattagacggttagacctcgtcttaagttttcctttcgcaacttgcatttcattaataatatatccaattagagaccaaatcatgtctactataactcgcatatagtactagctagctagtaacattgaaagatatataatgccaacaagctagtgctatgcatgcatgggtgcaaaaacttaattaacacttgtgctggtttggattactccagctaatttaattcagaaaatatacttcataatctaaacagttgctttggaaaggtggctgaacacatcgacatctgaaaactaaagtgtactgaacaaatggacatgatgatgctccaaataaaggggggagagatactatgacagtatggcactagcttagtatcccggatttggagaggcttgaccaccagatattggtgtggggatgctctggcatctgatctccaggactccgagaggacaaaggttgcaaagctatgagcaagttccaaagctctgggccttctctctccccccacaaattatgcgaaagtgtgaaacgtccctctcctctttatttcccattaagggaccgagaccctatttccagatttgtacttcgagaatgcaagatgcatgatagtacaagtaccatagcagatggtgagaatcttgcagctagtgtcaattttgggcttggcatctcatggccagcagctttccagattttgcagctctgccctgctggttaaacggaacctcactgccactgccttgctacagctttgcctgttggttaaacggaacctcacctagacacagtcttaagtattgctatatatactacagtattcaatcacacatataattccaagcaatgaaacgccaaaaacatgactgaagatgtcagagattcagaggccattataaaagctgcaggtgaaacaaaaagagggagggcagaaggctcctgcctcctggtggctggttccttctggacctatatactgaatgccaaaactaagtacagtacagtatagtaggagtagcagtacaagaacgccaaaattaagcacaggatagtacagtacttgatcgtatactatcctgaatttgttgagagcaaactttaagctaggagtatactactactcctactttcttgcaaaaaaaatggtgttcaaaatgcatgcttcagatcgacctagcttagctagggttcgaaattttgaccaggtcgagaaccattcaatatcaccatctggttccaaaacaaaaaataaaaataaaaaataatattcaacgccaccaaatcgtgagcttgaattcagaccagtgaaagtgaccataagacagttctggtgttgcacatgtttcagaggttgaaaaaagggaacaagagtttttcagaaacatggttctaccgatcaaaagatacaaactagaataggatagtaccatattacagaatgcaaaagagaaaaaaatgaaaaaaaaacacttggtagaattaaacacaaaacattggataatctcactgacctttggtttattccgagcttgctcttgcaactctcctctagcttcttgcccccacagatgttaaaatatgtgtatatgataaacctcctcatgaatatgaattgaaatcttaatttgcaacgcatgcatgatagatgcatacgtatgttgcacccagtacaaaggcctgtcgatcgtccaatcaacaatccaacatgcatgtcgcaattttgtaccattagcttagcttgcatatctgcattggattgctatggcttctgcactgcgcaattcttaatttggagaatttttgaactggatgctaagacatgggtcagaacggtggcctgactccgccggcgccggcgccgctccaacctccgaagttgtctccggggagctgatagcctcccacattcccggcgaggttgtagagcgacatgccaccggcgccgccggtgccgtcgcctcctgtcacgccggaggactgtgacgccgccggttgctgccctgggggtccagctgattgtgccacttgatcttgtgcttcgcctccggcggcgggcgcggcgacctcctcttcctcgccctccagcggcagccgctcgtacacggcgttcgcgaatgaggccgccatcaggacgacgggccccgcggcgaccagcgggcccaccacgctgccgccgatcacctggccctggccgccggagaggaacacggtgaggccgctcgcgccgggtggcgcgggaggcggcaggaccgtgcccgtgagagataggatctcgaaccggccccgcagcgtggccaccatgctgcccggcggcgacgcgcccggctgccgcagcgccacgttgacgacggcgccgccgccgctcagcacgcacacgccgcgccctcggcggcgggcgtactcggccacgcagtcgacgacgtcggcgccgccggcgacctcgagcacgtgcgagtgcagcgcgttcgggctgtcgcgcgtcacgatgatgggcggcttcggcttgttcttggacccgggcgggcgcccgcgcgggcgccgcgtcggcccacccgagccactaccgccggcgctgccgctgccaccctcgacgggcaccatggccgacgacgacggctggtggtcaccgccgacgccgccgcttccactccctcccgcgtgatctccctcgcccacggggctcttgtcgggtgacatcttggagtgctccatcttgacatgggatgtcggcgacagcggtgacagcggcgacggctgctgcggtcggagcagatggtggaagtaccgtgagctgccggcgccggcgccgcccccgccagggtccatcccggccatggccgtgtcatctggccgctcccaccacttcccggccgccagcttcccggttgatcggtgcccctcctcctctacaactcgctcctcaccatcaccaccacaacctgccaagacaaagcgagattaagccccttgtaaagaatctcgaagtaatttgcatggcacagtagtgcagcccaaacccaaacagcgaagcaaagcaaagcaaccaaagcgaaatgggagatcttttcatcaacagcaaagctttggcctttgacttgtccacacatctagcagctagctctagctagcatagctaagctacccagcaatgatgaagctctcaaaacgatcgatcgctgtagctagcatgttttccttacctccgccgcacgcttctcctcctccacgcaccgctcgacacgtcgacaccccggcggcgcgcggcagaaacctccctccgacgaacctgcccagccgatcgatcgcccaagaaaaacctccccggagcagcaagcgaaacgatcgttattccaacaaagagaaggtaaggaggcacgcggtgtaggatgggggtgaagcgggcggcgcggggccgaattaaaggagaggagatgaagaagcgaggcggaggggtgagctcttggggggacggcaagggatgggatggcgctgccgataaggtcagggaggtccgcctctctctctatcaatctctctcacgatacaatgccaatcccacccacaccaactccccggtttttactagcagctcgctcgctcggggaacggaaaggccggcctgccccgcccaggccaggccaccgcgcgcgcgcgcgtgtgggggcaacccgaagtagcagaggccacgtacgccaaagcgagcgaacgaggcgcccgccgcgccgtggactcgtttgtcgcgttcgttgaacataaaaaacgtggagtacgtctccctcccccgcgcgcgcccacgggacgcgcccgcactgcagctgcacgcgacgcgttcgcccacgacgtcgtggtcgacgcgggtcgtcgtgaaattcgcgggcgcgccgttgctctcgcgcgcaggcggccgcccaaatgcgtgcgcggtagcggcagcgcggtgcatgtgcatgcaccgatcgatcggtgccaagtcgagggtagtggtgctgtcacgtagggtgtgcagggctcggtcagtcactggacagtaggcagacaagcaagcaaataattggacctacaaggcgtgttaaacaattgggtcgtcgctttttactgtaccggtgatttttatatacacccgggcaagtacaagcaatccgcataagataatactacacgggacctgcatactccctccgtcaaaaaaaaaataaaaaaagacaaaacctggtctccgtgtccaactttaactggccgtcttatataattttttttataattcgtatttttattgttgttagatgataaaacataattaatattttatacgtgacttgtctttctaattttttttataatttttttaaataagacggacgatcaaacgatggacacgtaaactagagtttgtcttttttttttttatgacggaggaagtatgtatgcaacgtacgcttccttcctgctactacttgaaaacctacgaaccggtcctgatttgtgaagcttttttatattaaaaaaaatctgcccggtttatatatatgtagtttaattatactatatagtatggggttgcagctaggacgcgtataaaataggagtagctaggtttcgcatgaaggctttttcattcgatcatatccaagagtattgggttcgtttagtactagtataggctgtgtttgatacttggggttgggaacccaactccaccgcacggaaaacggagcggtccattagcgtgtgattaattaagtattagttaattttttttaaaaatggattaatttgtttttttaaagtaactttcgtatagaaactttttgcaaaaaaacacaccatttaacagtttgaaaagcgtgcacgcggaaaacgatggaaaggggttgggaaacttgtggaaagaacgcagccgttttggcccccatttggagcactgtacgtacgtaattgtccaacgattatatacatgcgctgtgtatcgcaagcttctagagctagccttgatatgttccgttaaaccaaactgcatgtactagagcctgtttaggataagaaatcggcttacgtttggaaatatttcaacatgggtacaagcagctgttcacaattccaagattggataactttagaaatgaagtggtttctcaactaatcaaggacgactcgaggtattatcggctgcgcccaaatactggcatgtggcatgcatggataggtccggtttggtgagaggtcccattcaggaactggaaattaatcaaacgagctgggcgaaaacttgagttttgcaatttgtgaccaggcttttctcggcgtggagaagccaagataaccttgtcgctttgcgtatgctctcaagtgttcaattaatttttaatagcggattacgggtcattgtcatgtgacgcatgagagagagcaaacaaatttgaatgaccacggcctgattggctggatctcgagacgcagcggtattagtttagtgccgcgcaatcacgaacagtgacttaatgatcgtcgccacagattagcagagtggagacatgaatggtgtatatgtcaatgaaagctacacgagcatataaaaaagggaggagctagcacgcaacaaaacaggttgaaatccaaaggcgagtacgtctttcggtcggccagttttttccccgttttttacgtgcatgggccagtacacatgttgactttgatacaccaattaattaaccatctttttttgacagcggccgtatagtaacatactggagtaagcatgttactagtaatttctaaattttgactctaaacgcaggtaccacaaacacgcgctggacactcttaagttgaatctcttttgttcggagtaattcttaaaagacaagagatcatgatatcttgagatcgtttaactgttgaccagctaactattgattgcattagagcaggtacaatagcaggttataagctagctataaacatattttaaagagataaatgaagagagagaaaagtagcgggctacaaatctgtagccagatgcagcacggacttcaagacgtaatgtgtgtatgatagatagaaccaggtattaatactatagtaaacaactattgtataaattggctattatattggctatagatgatttagagctagtagttggttatactattaaacttgctcttatatgcacctggtacatatacctggcctagcatgcatcatgatttattttttatttttaaaaagcatttctgcacggtgcacagtgccatgtcacgcgtgcatgcatgtcagaacttctcggctgctagttacaatagctgtagcatcaattatagatcagttttgccactttgccctaaattaaaacagccatcggtgcagacgtaattaattaaccatcttcttgaaagtgatcggtaccataacatatcatgtcaacaaatggatacctctagcagttgtattattctttttcacagttttttttaagaatgagttactctctccgtctaaattaaatgcagttttacactattcatgttcaacatttgactgttcatcttatttgaaatatttttatgattaatatttttattgttattagataataaaacatgaatagtactttatgtgtaactattttttaaaatttttttataaacttttcaaataaaacggacggttaaacgttggacacggatttctacggctgcatttattttgggacggagatagtatatagctgcatgtagttaattggtgcagacctggcaccatgaaattaaagaaagcgctgtgcacagtgccatgtcacgcgtgcatgtcagcacttctagcatcaattagatcctaaattaaataaccaattggttactggatcggagcacataaattaactcggtcatatgatactccacagtactagtatatatgaagatgaatccatccatctatatacacggtggtattgtggtaaaattaaagccatgcatcgccattccgattcatcccaaatcagccgaaacaaacagatttatacttcaaatagtactactacatcgcattgtattttagatttgtttattttaggatgaaatgattatatatgtacatttgattttctccgtagtacgcacgcgaagaaaaagtactactgcaccgatctggcaggactccgttggaccgatatcgagcctcgtagctgcaagagctagctagatcaccgtcacgtgcggtcaaggataagctagggggaccctctcgtccggtcaaaataaacgagaacgcaatgtgggggtgatgggcggctacaccgtccgtacagctgtcagacacgtggtggtggcgggcaggcgcgtctcggtcaccatctactagcacgagcagctagctagcgagagatcgatcagccaccgcgatgatatgatatgatcgccctcgcggccacgcccacgcgggccacagttaagcccatctcgccctcctcatcaatctctcgcgatccccaaattcatcggtggcactggcatcggccggcctcgcctgaatcaaacggccgttttagagcaagtttaatagtatagcccactattagcttcaatttatatatagccaatctaatagtcaatttatacaatagttgcttactatactattaatatatggtcccacatgtcatacacacattgtatcttgaagtacgtgctgtagctggctatagatctgtagcccgctgctcttctctctcatcttttatctcattaaaatatgtttacaactggctaatagcctgctattgtaactgctatttatcactgcatcttcctctcccattcctcctgcaagtctgcagcaagataacgcaaatgtgagctctgtatacctagctgtgacgccccctgtatcaagctagatatatagcccgtatagtatcccgtgctagctgcagccttcactacttggactctctctctctctctccgtgatcactgcatatgcatttgcattgcaaacacgcgatgcaagtgatatatccatctgctttccctgatcagcggttgtgcctgtgtaaacgtatctcgcgcggtgcgccggtgcctacccaacccctctctctcgtcccatgcctccatgtctcatcccatcgatcgatcgatcgctgcaagcatggccgctggccccctgttgcaacgagacacacacagtgcgctcgcatccgtatcaatatcattatcaattatcatcaccgcccggccagcgcctttgatttctcggtctttcccgtgcatgcgcgctagctagctagcacgctcttttattgatctctgcctgcagcatactctgcacgcacgcacagtgtgatccattcgcaagcagtacgtgctgctgctgccacactgcacttacgcatgcgaggccgccgatcgagcgcctctctgatagatcggcaacatgcatgcgattgaagcattgtgttgttggatatcgtttaattgattagctaggctggtactctcctccatagtttagttactgtgcagtattaatttgggtgggtgacaagatcaaatcaaaacattatcctgcagtagcgaatagtgattgttgatttgttgtctatatagctatagctctgcctctaaattaaagcgacaaacatcgtccatgaatgcacccatgagtgacctcatgcgcatacatataggggaggggggggggggtagtttgctcttcctggtggcatatttatttactagctagtgctagtattgaatcgaagctacgagaatcatgcttccaatccaattccaaggtacgttaagttttatagcatatcaaagacaccagaacaaacgatacagtacatggcaggggtttattggctctcgcttgtatttttgcagatatagaattgtacatagggtggacaaaagcgttggaacgatctctccactggcctgtaaaataattgagcagttgtgcacttgattaagagttcattatccaaagagtgctggtgttggcttcctcaactaaacaccattgtttatgtgttcgagcttatgattaagttatctaggggggttataaaattgggcaggcgagctagatggccgggccaactcggcttagctacacttggaagctatattttgatgtgacgccttgcgtggatggcgacaaaaactgccttacatgccatgccatgcccactgccatgacctaattcttctcactgttggtggctgtgcatgcaagagcatgctagctctgcctttaattatttcgtcgtttattaagtcaagtacgtacagggacataaacaatgagcggcaactcaactaaagaaaagggaatctgtgctcacctgtagtacggattatatgcgtgtaaggttttctgctttctggttgcaaagaaaattgtgttttgaatgcagaaagagagcgagaaacaaattcagttatagatacatgttgcatgttcttctggtaggtttgaaaaatcaagtagtaatactatactctaccaggcatgcatatataagacagtgctaaggtaatcgatccatgcctgcatgttatggataataaaactcatgacgacttcagactttcagagttgacgattggtgcgctgcgactagctccgctgctttgtttagtttgacgcatttgcctccggatatccagcttgtacaggcgaatagtcctgcagctaattaggttcaggtattcaactgccaatagttaaacatctacagcaaactcaatgataattaagatccaacaaaactattattactatcatggcccgcgagtagcttgctggtacttactccctccgtcccataatataaaggatttaaagtttttaattgcactgtttgaccactcgtcttatttaaaaatttttaaaattattatttatttttttacttactttattatccaaagtactttaagcacaactttttattttttatatttacacaaattcaaacaatacaaacaaaaactcaaaatctcttatattatgggacgggggagtagtaattaactagttcaccaataatttggtggaaaattaagtcgagttcaacattaatttatgcacatagccatccgtccaagaaaaaatcatcaacttctgattacgaatttggatataggctaggttcagattcgtagtcaggatgtatttattttttaacaaagaaagtaagttgatgtgcgcgtagatctaagttaatttgtctgacggctctaattaatgcactaatgccagtagtccagcagtactactgcccaagtgcccagccggccggtatagatataggggctgtttggttcccagccacactttaccattacttgccaacaaaagttgccacactttgtctaaggtgaggtgatcaaattgttagccacaacttactaagcctaagggaatcttgccacacttttttgagccattgacacgtgggacccaatttgttggaggggaatcttgccacaactgtggctacaaccaaacacctgtcaaatttgcctaaccttagagcatggccaacagtttcccgatactcttcccaatatcagttttgaggagttttgttggaaaaaatcgctccaacagtagacctaaatcacccctaaaagcttggcgtttccaaacccgcatatttcgttctccacttgtagggaagagactcggcgcccaatccttcaaccgcatgcacttcgcgcgcgctgtgtgaaaattttcctaccaggttcttctttgtgcgttcgtctacctgtgagtcaatccatcacgccagcagcctcatcttccccgcagctgtctgggaaagcagccatggctcccccaagcttccccagcgtcgacatttttttctcagcggcagcgccagacccatctccaacccaattgggcggaccttcgtcggcgctcccccagcaccaccaccgactcgaatcggccgtcgcccctattcatctccaatcgtccctcgaccctaccgcatcctgcagcacagcctgtctctcgcgtcagactggcgctgcgctccccccggtaatgtgcaggcgacaaaggccccatgcgatgcgaccagcagccggcgacaaccggaggtgcccagtctctggccttcatcgaatcatcgtgcacctcggtcggagtcgatttctgattgttgctgctgctcaaatctggagcttgctattgctgagaactgcttggtggtggtactggaaatttgttgtttgctggctgatgaaaactgttgttctttgctgctaaaaactgctgcttgctagtactgaaaagtactattgcagctgctgaaatatcttgctgcttgctgctgaaaacttcaagttgttaacaccgttcacactaaaaaagctgaaattttttttctgggctgaaaaccccattgttgatgattgcagaaccaatatttttccatgtaaaatacaggagatcgtggtaataatcaagtgaaatatcattttggggcaaatactcagatcgtacctgaagccaatggaaacattgttcaatgcttaaactgtcagttatgatgtcaaagagattgatcactgaatgtcctgaaaggagccgtgaggaggatgcagcattgcagcgtgtgcgagcgtgagtggaggagaggaatgacgattctgttggtagttgtcgatgtggcctactttttttgttttgaggattaaattttgggaatctcttggagataaaaggtattctcataccttaaatcctttttagagatctaaaaaaaatgatttaggggattgaattttgggtggctgttggtgatgctcttaggcgtggcaaactgtggcaaagtgtggcttgcaaccaaacacacccatacagccgcaagttggacatagagggatatatagctcagagatccagtactgatgttaatttgtacggcgtacgtgcctctaaaattcgcaaagatcaatgtatcgaataataatgtaattaaccatatgatggagcgcacacgcaatatcaccgccagcaggcaagataggactatattcaatgtttcgattgctgtaaattactccattcgtactcgtaaaaaaagtcgtttagaacaatgtttaaatcaaaccctaagaatataaatcatgaataacttttaagttgttgagtttaaaaatataaaaattatatgaatagatttgtcttgaaaaatactttatgaaggtatacgtatatcacttttcaataaaatatttttatagaaacaagaagtcaaagttgtgttttggagaccgtatcgctgtccaaaacgacttcctttaggccattcccaacctaagacactagatatggtttccataaactccacatcatcaagaaactagtactccctccattccataatataaggcacaaccacttttcttacatgttccataatataaggcatgcatgcaaatatgcaattaactatggcatcttcttcattaaattataacttttttaaatcctccactctcatattatctaatcctattgaatgcatgcattatatttacgaggatgatccaaactacaagatgataataattacttcttggtctttgggttaagggtggttgtgccttatattttggaatggagggagtactagacactactcttccaatgcaaacaccactattctatacttaaatttaatgctacttatctcacatgatgtcttggatgttgtgtagaaactatgtctcatgcaagacatggtttccttctctttcctcatttattcacttgtcacatcatttttcatcataggtgacagtttatttaatgctatagacaccatcctagtcattgggttgggaatgcccttatattctgagcactgagggagtatattactactaatttaaaagcacaagaaataataactaattaatcaataagatcctcagaggcaatacatgcatgaatcttacttttgccttgtcgcagaatataaggtagctttgtgatatcgagaccgtattttattccatatctattaatttttatactatttaattcatatatcaacttttgtactactccctccacttccatggttataagacatggttataaagtcaaactacttcaaatttagttaagtttatacataaatataataatatttataatacctaattagtttcattaattcaataattgaatatattttcataataaatttgtgttgaattgaaaatattattattattttttacaaacttggtcaaatttgaagcagtttgactttgttaaaagtcaaaacatcttataacctgaaacggagggagtactgatttatttattcaattattatattaacttttataccatgacttgttatttagctattttcttatttcggagagcgtgcagtttttcctatgtgttcattgaactcaaataactatagctaatttagccatcttactccagtaccagataacactatgcctgcctctaaatagtcaaagtctgcacaccctactagagcatagtacaactgaatttgaatctactccatccattttatattataagactttctagcattgcccacgttcatatatatgttaatgaatctagatatagataatgctagaaagtcttataatatgaaacggaggaagtacgatatacgaagatatgaactaaagtcattgcttaggagtattgctatacgaccagaattaatcttagagaaaaccattctttacagcctgttttggcgcacaatggttaaagcaggcagcagccaattaagcaactacagctatatgcctagctagccgcaggcaccaagttaattaatcaatctgtacgtacagaatcaaaaagcctgtcatgatgtcgcttattagccagaaaagtacttaagcaatatacaaatctgtgaaaaggcgaaactcatagctttgtttcatctttttcttccacgtccgattcccttccgtacgcgcagatcagcgcgtgcatgcatgctgaaactgcagatcgtacgatccatatatatgcaaaaatacactaccgccggaaaagaacacacacgatctatttcgggaataactcactgcgttgaaaaggacagtgcatcagaataagttaacactaattaactcccagccacgcaaatttctaggctttagttttgattaattaaccacagaatccgatcgaatttgagcacagcaaaaaatgtacatcagcttagtagctagctgcagtcaagctaattaagctaattagctcgcgactggacaggggagcaagagaaccatgatatgattaaatattttctgcaccttaaccaatcatggccaagagataagctaagctagctaggcagcatccgatggccggccggctaattaagaattagtgcctgggcgaaaggctgattaaagctgcgtggatgcaagtggggaggagtgattagattagattaggggggcaggattaagataatccgagcggcgcgctgtctcatcgccgggcatgtgctagctccctcgcctgtcgcgttgcggcgccaagcgtctctcgatcgatcggtagctcgcttgtccgtgcatggcgccatggttaacctgatgatgataatgctaatcttttcgttgaagccgtctgactttagcacttgattgttaatgaccttattaagcagccagttgattactttatcggtcgggaagagacttgaaatgatatgagatatgcgcccagttgccacccgcggggaggtcgtaatctgcggtgacctaatctgggttagagacaggcaacctctcaattgtcacattaatttgtaagcacgtactcatttgtgcctcttttgtgtctcctgtcatttcgtataatttgcctggctcccaaagcttacagtattaattctctctatatataaagctggctcgatgattcaattctactacataaataattgtttgttcaggagtagtactagtacttactaatctttattcataagtaaaccttgggaaccctaactaatgatgaaatggcatcagaaaaagccatgcgtgaagtgtcacgccaaggatatgggacaggtgtcgaccctgggattcgcctacagtttttttctttttcagggggattcgtctactgttggctgcaccgcacaggctactgcaggaggaagagagagagagagagcgcacgtaacgccgcggggaatgggtcacgcgccacacgtgggcgacggccccgcgcggtggcgaggcgaattgggtggaggggacggggggccgagatatgtcacatcgaatttttgatacgggccggccgtggccgtgggccgcgcggccacgtgacgatgccggcggatgccgcgtcccggagcggcgttggccactgtggccgcgcgcgcgcgagcccgaggccggaggccaccatcatccgtccacccacccgtgccgtcgcgtcagctgctgatcgcggtctcgatcgccttggcgcggaacgctccgatgtcgtcgcgtgcgggattgtggcggcgtccgtgcctcacgcggacgtgatcgcgcattgggggtgtggtgtactggtggtggagcaaacttttcgcaaggattgtgtatttttgtgccgtgcgagggctggttgatcttgcactagcagttgcaggagatagtgctggacggtggaggactggaggaggaggaggtgaaggagaattgactgggtgctttatgggctgttttgggctacaaatctggcccaaagtctgttcatttcggtctcttgggccggagagaagacgggagaattgttggggtgctttatgggctgttttgggctacaaatctggcccgaagactgttcgttttctcttcaacagcgtggaaatttccgggattttgatccaatctgccttttctacttgtgtattgaaagcgactacacaagaacagaagttattatatgtgcacttgtagattcgaggtaggatttatttagctactaggagtaggattttggttaaagataaggagaatcattcaagatttcaagtggttctagtgcggcgtaggaaccagcatagcgcggcgaggatattcttcagcaacaacaatagaaagcaggcgtgattgaacacgagaattttcgcaccgaaatctgtgagctcaaggaatcacagcacatttggcttttgaaatctgtgtgcttatggaacgaaccggaccagtatattcgacttaccttataaatcaaagcaagtacctgacagcaacaggcacaccattgcgaaaaaataaaaagagaaggcgttctgatttgatccacactatcaacactcggtcacaggcaacaggcagtcaggcaagatgcaatacaggctacaaaattcagaactgagggacatggagggaacaaaaggcagaacgaacagtaaaatgaacatacacagtcaggttctctatgctgtaaacaaaaattactgagctgctatactgcacaaaagcataagttaacctgacctgctgctatccagaaaaaatggaaaaataagtttgattggttacagaagaatgaaaaaaaaaactgaagggtaaaattacagtcagaagctgcactataggttaatgcctcctcacacattatgctagtataatacaggttgagtttggaactaaagaatcgctctcttatcagcagtatgtacaagcccattgctcattcgcttctccacaagctcagggcaatccctgtctaaatatgtccagcatttgaatgatgcgaagggctgctcaagaagcagccttggcgacatccttacttgatcgattgtacatcatgtggctcttgacaaggtgaccagaggcaagagcggcaaggagcgagagctcgccagcgagcacgctgccagctactatggtagccaaacgtttagcatttgcaccaggtgagccatgatttgaacccttgacaccaagcaggttcaaacaagccgcctgtgaggccagacatgtaccacctccgattgtacctacctgagagaaaaaatgaaccattttactaacatgaagaaattaaataaataaaaatcgatgcggatattgctctcacgatcaaactgcatgctaaaacaaaatattacttcagttaatacaagaagatctctatgctatagattttgcagctccatttaaggctagcaggttatgctataatctacataatgcaggtaggaacggaaagtaaaacgaataaataatcacctcaatggacggcatggtgacagagatatgaagatcatctccatcatttacttcttccaacatggtgatgcattgtgagctttcaacattttgtgcaggatcctgtcctgtagcaatgaataatgcagtaacaatattactcgcatgggcattaaaacccccaagagccccagctacagctgatccagcaagatttttgataatgttaagctcaacaagtttttctacagtcgtcttaagaactttctgcacaacatctcctttaataatagcctcacaaacaacagatttcccccggccttctatccagtttacagctgtcggcttcttgtctgagcaatagttacctgatgcacacagattaattcatcaatgtgcatgcaaagacaagaaaatacatggtgaattgatgaaaacagatagtgtgaacacccattgtttcaaaaaaagcacccccggcacaaatgcctaattgatacacgcaaatatattatcagagaatattagaccatgtttgatgcgagtctgatgaaaagtagtacattcactgttattcggtaatcagaatatattttacaattgaactaggctagtgcacaatgagcagaaaataaataaaaaggcatccaaaaatacttcttagggatgaaaaaaatccatcttataacctgctgaatcttctaagaaccgatatctgctttctgtaaatgaagccaagggtttcctctctagatcggaaaaatctaattagggacatgtttctttaagttacaaagcaataggagaggaaatattttgggtgctgatgaaatatgtttttcatcatttccttcgcaacatttccaaacagaagttaaagaatgtgattttttattcgttttctgctaaaaggaggcattgacttagagaggaaagcaaaactaactgaagcatgcaaagttcaaggggaagagttaaaaccagatacgctgatgacatccatgtcagggaagacattctgcagatagcccaagacattctcaacaccttttgacaccatgttcattcccatagcatctccagtgatacagctaaatctcatatataggttcctcccagcgagtgcacaacgaatgtcttgaagcctaccaaatctgctggacctacaccgattaaaacagtttttatgtcaattctaatagaagatgacctctatatggagttattggttctactaaggaagcgaaacaatagagcaaaaaagaaaaaaaaaggatgatgtaagaacgacttaggccctgttctattcttcaacttccttgttttccgttagcacgcttttcaaattgttaaatgatacatttttttaaaaaaagtttctatatagaagttgttttaaaaaagaaaataaatccatttttcaaatttataatagttaatacttaattaattatgtgctaatgagctttctcgttttacgtgcaaccaaaatttatctccaaatgtggagattaaatggggccttagataagcaagctgcgtgattgtctcaaatgaaaatttccacaataaagtatacattttttagataatggatatcattccggcctctacactccacaagagtgtacacagccaacaataaagtatgcatgaaatttactaaattagaacttatatagggcacagaggaggataacaatcagataagttgtacaaacagattgattctcacagtataatggatcttcaaacaatagtaccaaatcaacactgtatagcaaccatattgtgtgacatttgccacatcaaaaactaagactgaaacatatgcaatccgaaatgcagaggttgaaagaacaatgtcaatggcaaactcacacttagctccggaaaagtccctggagaatacactatgcaaaaaggtatccatggaaccatgacacttgcccatatatgcaacccatagagttgcgtcggtattgggtagatggttctagctgccaagaacaactataaaacattgtacagtttaaaagatcagaaatcaaataagatgtatagacacctttgactttgactggtagaataatatgccgatatgtacagtgtctgaataactggatacgaaaaatcaaagaaaaatatgaatatgaaaaatctgcacaacaaagttgtggaaatcacagaagtggcttgtgtggtaaaatagcacaagtgaggatattaggaaagtatactaaatgcagcatacctaggaactaactgttggacctatttggaactttgaaacacacggccacaattttttaaagagattcaataaaaacctccatattttctcagtactctcaaatgacagaaaacaatgtaagaaaagatacattaattagaaacatgaaaaccaacaataacttattggaacacaagcctactgttatctaaagtgtacttaatgacagtaaccaaagcttttgaacatgagcctacaattacgtaaaggttccagacaacaaaataaaacaaaacaacatatcgtacatttaaaaaaaaagagagagacaatagatcctctaaggatactgactacagagcgacagttactagtcagtaacacagaaaaactccaaaagacaaatgacattaatctgaaaattctaacaccgtaaactgtcagtagatgtgtgtaccctgagtccctgaacatctgaaggtgcaaagatacacactagaggttgagatcttaaatccacatattctcaagtttggagagcacaaaccaatgattcattcacattcggtattatttaagcgaacataaaaaggcaattcaaggtgaacacttcagaaaggtattatctatgagctggcattatctgcatttagctggtagctcttagaacaagtaaacatagtattgataatgcattgtccagtacctccagtgcatgtgctagcttacacactgtgggctctaccctgtcagcaatcacatgatagaagggctttccgttgtgggaaatcacctggtcttaaaataccattcagtgctagctatcaacatcagtccattactcaaacataagacgacaaccttaagatacactgaaagatcacatttttcccccattaattaacactgtgcctgcctattgtcgcgcaaagtcttataacactttgagcaagcacacaaatcaacaaactagattagtggatgatgtggagtgtacctattgaagacagcagccagcaactcaaaattcgcaggcgcctcagcaaacgccttgagctccgctgcccgcattgcggaaggcagcttgacagcaggagcgcgggacatggcgtcccggagcagaacgctgaaggcgccgccggaagcggagatggccctgcacccgcggttgacgctggcgacgaggcatccctcggtggtagccatggggacatggtactcgcggccgtccaggagcagcgggccggcgacccccacggggagctgcacgtacccgacgggcatctcgcagcattgccccaggatggcctggtagtccatcccatcgaaggggaggccctccactccccgccccgtcacccgccgcagcgcctcccgcctcagcctcgccgcgcggcggcagtccccgagccgcgactccaggcggtgcgacggcagcgcgccggacgccaccgcggcgacgatctcctcgtcgtcggcctccatcatcccgccaccatgcccatgcattggcgcgggctccgcggcggcggggcgcgcgcggcgggagcccccctggccgtcgtcgtcgtcgccggtggtggtggcgggggcgtcagggtgggcgaagaggctgacgaggtagacgacggtggcgaactcccggccgccgaggggccgctccctgtcgctgcagaggcggagcaggtcgcaggaggagagcacgagggagaccatggccaggccgttggtgatccgcatcgggaggggcagcgccccccaggtgagcgccctccgcgccgccccgacgatgcgccctccgcccccgccccggcgcacgtccatccgcctccttggcccaggatcactggagacagagagagagacacaacccaacccaaggcgatcgcgaacgacgcggacctcgcctcccccctcccggctgtgcgtgtgcgtgtttgctcggtacgcgatcggagggggggatcggacggacgggagggtgtgatggtggtgtacacggaaggcgcagcgagagagaggggaggtgaccgcgggattgtctctctcgctcgcctcgggcgttcagatgttcggcgtgacaggacaggacagggggatctaagcggcaagccgcaagcagaggcgtgggcgggggagggggaacggcacggggcccgcgcgcggatgggcggcgggttctttcttttcttccaagcagaagaccgggaggagacaggagaggctcgggcgttttccacgtccgatgctgtttgcaaattgcaaatctgctcttttgtcagcagtgtgagtcatccgtcatcgatggagctcagcgagaaatgtgtttttttttcttcttctctcttttatgcagtcgatcgtttggaaaagtgtgaacgagaagcactctctactcggtaatctatgatgaaatgtgtggttgatgtgatgaactcgctcgagcatgggaatggtgtgcgagattttggtctcagtcactgctcaccttggaaatattttacatcctgactaggcagttatgtttgggttcagagactaaatcttagtacctgtcacatcggatccgatgtttgacactaatttagattattaaacatatactacttacaaaactaattatataaatgagagctaattcgcgtgacaaattttttagcctaattaattcataattatcacatgtttactgtaacatcacatagactaatcatggattaattaggcttaatagattcgtctcgctaattagtttagagttatggaatggattttgtcaataatctacgtttaatacatctaattagtgtccaacatctgatgtgacatggttccatccaaacccccagttcggtacatttggttcccaacacctctctctcatattccgcgcatatgcttttcaaactgttaaatggtattttttttcaaaaagtttctatacaaaagctgcttaaaaaatcatattgattcatttttgaaggaaaaaactaatacttaactaatcacgcgctaatggaccgctctatttttcgtgcgcaacatatatgttcccagcagtgagtgccgaacacagaatctttatcataaggcacatagttaaaacaaatattcacttcgtccaaaataaattaatttagtatgagaagttatatatctacgaatcatatattttgagacaggtggagtacagtatatgatctattccctaaaatttttttgatcaaattcgtatgagattatttcatacgttcacaggacttttactgatcacacaatataatggtggtcataaaactttctaaagtaattttgaatttctcttatgaataaagataaagaattaagaagtacatgtttcacgacaattgttgtgtgttactattatactacattagatgtttttagaagtgttaagtgcatactttaggtcttctatataacttctacttttagctcttttttcgtaaaaagggtgcgacaacttagtgagtaaaataggatatgctacggataagatcaaatgagtaacttttagccctaagttttttcatgtcattcttcggacaaaatgattcatttataggaaaagctaccatatttactgtagcagccatactatcatgtatcaagatggatgtatggaacgtactctatatatgctacggataagataaaatgagtaatttttagccctaactttttttcatgtcattctacggataagataatttatctataggaaaagctatgtttactgcagcaaccacactatcatgtataaagatatattgaatgtactatatctatccacgattataaaaattcatctaagtgtatagttagaaatccctatatttatggaaaatgtggtagtaatttatcttagcataacaccacttcaacatctcaattccactttagtatggagatgttttctccttcgcatagagatagttaattaatccttaaaaacacctttctcatgacttggtaagtcaaagaaatagctagtaagttacatgttatatatactctaatatacatgtttgtaattaattttgttagaattataaatacaacctcatcagaatatccttgaaccaaaaattaaagaaaaatgacacatcacatccattgaatccaaatagaagaggcatgtagctcttcaacttgttttatataaaatcaattgcttacatgctaactgagatcatatgaacagtataaaaacgcgaaaaacatgcaacgaacttttaaaattatattatcataccgtgatgcaacgcaatgccaatctactcaaacatgtccgaatccaacttaccttatatcgaccaaaacttacgacaagtagcaaatttgctcatcatccacgaacacttcgattccaaattcgtttctaatatttcgaagcgcccgcaatttcgctgtcaaccgcgtgatccatttgaaaaacccaaacagctctctccctcttacactgtcacacacactggcttcttcgctggcaaacgaacgtgacttgggttcccgtagcagaagaaggcgcgccaacccaaccgtcggccccagtcacaatcccccctttcccctcctccgccgactcgcccaccttttcccccttccaaaatcccaccgccgattcgctcccactcgcgaaccctctccaatcccaaggtcggagagggggacagcgaagctagcccacccgcaccaccgatcctcgaagggattccagccgatcgctgcgtagctcgccggatggcgcagcagcagcagcagcaggggtcggggtcggggtcggcgtcggcgtcgagctccagctcggggctgcacctgctggcgtcgccgttcggggacaccacctacaccaaggtgttcgtgggcgggctcgcgtgggagaccaccagcgagaggctccgccgcttctacgaccgcttcggggagatcctcgaggccgtcgtcatcaccgaccgccactccggccgctccaagggctacggcttcgtcagtgcccttcgatttttcgccgctgttgatcctgctttttccgggtgtttgtttgtttgttcgtggaattgctggctgtaaacagtggttggcttatacaagtgtcatgttgaccttgtgcaggtgacgttccgcgatcctgagtcggcgaggaaggcatgcgaggacccgacgccggtgatcgacggcaggcgtgccaattgtaacctggcgtcgcttggccgcgctcagcctgcagttcctctcggtattgatctccctgccttgacactgatttgcactaacttattcgagtagattatgagcacattttgataccacc
